(19) United States
(12) Patent Application Publication
(10) Pub. No.: US 2004/0078837 A1
(43) Pub. Date: Apr. 22, 2004

(54) Four human zinc-finger-containing proteins: MDZ3, MDZ4, MDZ7 and MDZ12

(76) Inventors: Mark E. Shannon, Livermore, CA (US); Yizhong Gu, Cupertino, CA (US); Cung-Tuong Nguyen, San Jose, CA (US)

Correspondence Address: FISH & NEAVE, 1251 AVENUE OF THE AMERICAS, 50TH FLOOR, NEW YORK, NY, 10020-1105, US

(21) Appl. No.: 09/922,181

(22) Filed: Aug. 2, 2001

(51) Int. Cl. A01K 67/027; C07H 21/04; C12N 9/64; C12P 21/02; C12N 5/06

(52) U.S. Cl. 800/18; 435/69.1; 435/226; 435/320.1; 435/354; 536/23.2

(57) ABSTRACT

The invention provides isolated nucleic acids that encode MDZ3, MDZ4, MDZ7 and MDZ12, and fragments thereof, vectors for propagating and expressing MDZ3, MDZ4, MDZ7 and MDZ12 nucleic acids, host cells comprising the nucleic acids and vectors of the present invention, proteins, protein fragments, and protein fusions of the novel MDZ3, MDZ4, MDZ7 and MDZ12 isoforms, and antibodies thereto. The invention further provides transgenic cells and non-human organisms comprising human MDZ3, MDZ4, MDZ7 and MDZ12 nucleic acids, and transgenic cells and non-human organisms with targeted disruption of the endogenous orthologue of the human MDZ3, MDZ4, MDZ7 or MDZ12 gene. The invention further provides pharmaceutical formulations of the nucleic acids, proteins, and antibodies of the present invention, and diagnostic, investigational, and therapeutic methods based on the MDZ3, MDZ4, MDZ7 or MDZ12 nucleic acids, proteins, and antibodies of the present invention.

### REFERENCE TO SEQUENCE LISTING SUBMITTED ON COMPACT DISC

[0001] The present application includes a Sequence Listing filed on one CD-R disc, provided in duplicate, containing a single file named sequence.txt, having 1,048,233 bytes, last modified on Aug. 2, 2001 and recorded Aug. 2, 2001. The Sequence Listing contained in said file on said disc is incorporated herein by reference in its entirety.

[0002] 1. Field of the Invention

[0003] The present invention relates to four novel human zinc-finger-containing proteins: MDZ3, MDZ4, MDZ7 and MDZ12, and a splice variant of MDZ12, MDZ12b (the original MDZ12 is here named MDZ12a for this reason). More specifically, the invention provides isolated nucleic acid molecules encoding MDZ3, MDZ4, MDZ7, MDZ12, fragments thereof, vectors and host cells comprising isolated nucleic acid molecules encoding MDZ3, MDZ4, MDZ7 and MDZ12; MDZ3, MDZ4, MDZ7 and MDZ12 polypeptides, antibodies, transgenic cells and non-human organisms, and diagnostic, therapeutic, and investigational methods of using the same.

### BACKGROUND OF THE INVENTION

[0004] Zinc-finger (ZNF)-containing genes collectively represent the largest family of sequence-specific nucleic acid binding regulatory proteins in mammalian genomes, with 600-1000 family members estimated for the human genome (Hoovers et al., Genomics 12:254-263 (1992)). Most ZNF-containing proteins are thought to act as DNA-binding regulators of transcription, either activating or repressing expression of specific genes (El-Baradi and Pieler, Mech. Dev. 35:155-169 (1991)). However, a few family members have been found to bind specifically to RNA (e.g. ZNF74; Grondin et al., J. Biol. Chem. 271:15458-15467 (1996)).

[0005] The most common form of the ZNF motif, termed Kruppel or C2H2-type, was first described as a repeated domain in the Xenopus transcription factor TFIIIA (Miller et al., EMBO J. 4:1609-1614 (1985), but is named after a similar domain found in the Drosophila Kruppel protein, which also functions as a transcription factor (Rosenberg et al., Nature 319:336-339 (1986)). Kruppel (C2H2)-type ZNF motifs share a common backbone polypeptide sequence of Cx₂Cx₃Fx₅Lx₂Hx₃H, where x can be any amino acid. ZNF motifs may be found dispersed throughout a polypeptide or may be clustered into one or more tandemly repeated blocks. In cases where the repeats are arranged in tandem, adjacent motifs are typically joined by a highly conserved stretch of seven amino acids (TGEKPYX, with X being any amino acid) termed the H-C link (Schuh et al., Cell 47:1025-1032 (1986)). The conserved cysteine (C) and histidine (H) residues collectively coordinate a single zinc ion, with the intervening amino acids forming an alpha helical structure that is responsible for specific binding to a nucleotide triplet. Among proteins with multiple, clustered ZNF motifs, each repeated unit binds to a different, but consecutive, nucleotide triplet (Suzuki et al., Nucl. Acids Res. 22:3397-3405 (1994)). Thus, for proteins with multiple ZNF repeats, it is the concerted activity of most or all of the repeat units that determines the proteins' DNA binding properties and ultimate biological function.

[0006] Another hallmark of ZNF proteins is that they frequently contain additional functional domains that further define their biological activities. One motif that is commonly found in conjunction with ZNF motifs in mammalian proteins is the Kruppel-associated box (KRAB) motif, first described by Bellefroid et al. Proc. Natl. Acad. Sci. USA 88:3608-3612 (1991). This motif can be divided into two sub-elements referred to as KRAB A and B domains. However, not all proteins contain both A and B domains (Bellefroid et al., EMBO J. 12:1363-1374 (1993)). Several studies have demonstrated that the KRAB A domain acts as a repressor of transcription (Margolin et al., Proc. Natl. Acad. Sci. USA 91:4509-4513 (1994); Witzgall et al., Proc. Natl. Acad. Sci. USA 91:4515-4518 (1994); Pengue et al., Nucl. Acids Res. 22:2908-2914 (1994)). The KRAB B domain by itself does not convey strong transcriptional repressor function, but may enhance the activity of an associated KRAB A domain (Margolin et al., Proc. Natl. Acad. Sci. USA 91:4509-4513 (1994)). A general mechanism for transcriptional repression appears to be shared by all members of the KRAB subfamily of ZNF proteins, and involves the recruitment of the common co-repressor protein KAP1/KRIP-1/TIF-beta by KRAB-ZNF proteins to sites of gene repression (Friedman et al., Genes Devel. 10:2067-2078 (1996); Kim et al., Proc. Natl. Acad. Sci. USA 93:15299-15304 (1996); Moosmann et al., Nucl. Acids Res. 24:4849-4867 (1996)).

[0007] A second conserved motif that is often found in Kruppel (C2H2)-type ZNF proteins is called the SCAN box or LeR (leucine-rich) domain (Yokoyama et al., Biochim. Biophys. Acta. 1353:13-17 (1997); Williams et al., Mol. Cell Biol. 19:8526-8535 (1999)). The SCAN box functions primarily as an oligomerization domain that allows self-association of proteins or association between different proteins containing compatible SCAN boxes (Williams et al., Mol. Cell Biol. 19:8526-8535 (1999)). Typically, the SCAN box is located at the N-terminus of the protein while the ZNF motifs are clustered near its C-terminus. In contrast to the KRAB domain, the SCAN box does not have a direct activator or repressor role in specific gene transcription.

[0008] ZNF proteins have been implicated in a wide range of biological activities that includes regulation of cell proliferation and differentiation as well as controlling patterns of embryonic development. For example, mouse Krox20 is a ZNF protein that is expressed specifically in the hindbrain, and disruption of the gene by mutation results in abnormalities in brain development and death shortly after birth (Swiatek and Gridley, Genes Devel, 7:2071-2084 (1993)). Another ZNF protein, human SALL1 has been shown to be the gene responsible for Townes-Brocks syndrome, an autosomal-dominant disorder characterized by abnormalities in the development of ears, limbs and kidneys (Kohlhase et al., Nature Genet. 18:81-83 (1998)).

[0009] ZNF proteins have also been implicated in tumorigenesis in humans. For example, the product of the Wilms' Tumor gene (WT1), Kruppel-type ZNF protein, is normally expressed during kidney development. However, mutations that affect the DNA binding ZNF motifs can result in embryonal renal neoplasia (Call et al., Cell 60:509-520 (1990)). Mutations in other ZNF genes have also been shown to be the causative agents in a number of other cancers, including acute promyelocytic leukemia (Chen et al., EMBO J. 12:1161-1167 (1993); Shaknovich et al., Mol. Cell Biol. 18:5533-5545 (1998)) and t(8;13) leukemia/lymphoma syndrome (Xiao et al., Nature Genet. 18:84-87 (1998)).

[0010] Recent reports suggest that at least one-third, and likely a higher percentage, of human genes are alternatively spliced. Hanke et al., Trends Genet. 15(1):389-390 (1999); Mironov et al., Genome Res. 9:1288-93 (1999); Brett et al., FEBS Lett. 474(1):83-6 (2000). Alternative splicing has been proposed to account for at least part of the difference between the number of genes recently called from the completed human genome draft sequence—30,000 to 40,000 (Genome International Sequencing Consortium, Nature 409:860-921 (15 Feb. 2001)—and earlier predictions of human gene number that routinely ranged as high as 120,000, Liang et al., Nature Genet. 25(2):239-240 (2000). With the Drosophila homolog of one human gene reported to have 38,000 potential alternatively spliced variants, Schmucker et al., Cell 101:671 (2000), it now appears that alternative splicing may permit the relatively small number of human coding regions to encode millions, perhaps tens of millions, of structurally distinct proteins and protein isoforms.

[0011] Given the demonstrated roles of ZNF proteins in cell proliferation, differentiation and development, in combination with tumorigenesis when expressed aberrantly, there is a need to identify and to characterize human genes that encode ZNF-containing proteins. Given the importance of alternative splicing in providing further tissue-specific and developmental regulation of human proteins, there is a need to identify and to characterize splice variants of ZNF-containing proteins.

### SUMMARY OF THE INVENTION

[0012] The present invention solves these and other needs in the art by providing isolated nucleic acids that encode four novel human zinc-finger-containing proteins—MDZ3, MDZ4, MDZ7 and MDZ12a—as well as a splice variant of MDZ12a, termed MDZ12b, and fragments thereof.

[0013] MDZ3 encodes a protein with a SCAN box and a more divergent KRAB domain, in addition to 7 ZNF motifs. MDZ4 encodes a protein with SCAN box domain in addition to 5 ZNF motifs. MDZ7 encodes a protein that contains 7 ZNF motifs and no additional known elements. MDZ12 encodes a protein with a divergent and possibly partial form of the KRAB motif (containing only the B domain) along with 12 ZNF repeats.

[0014] We have also isolated a splice variant of MDZ12, designated MDZ12b (and have thus denominated the originally isolated transcript MDZ12a), which is expressed in some of the tissues tested. MDZ12b may encode a protein with 12 ZNF repeats (termed MDZ12bL) if the internal initiation methionine is used for protein translation, otherwise it encodes a 44 amino acid peptide (termed MDZ12bS) due to the introduction of a stop codon in the inserted exon.

[0015] In other aspects, the invention provides vectors for propagating and expressing the nucleic acids of the present invention, host cells comprising the nucleic acids and vectors of the present invention, proteins, protein fragments, and protein fusions of any of the four novel human zinc-Finger-containing proteins: MDZ3, MDZ4, MDZ7, MDZ12a and MDZ12b (S and L), and antibodies thereto.

[0016] The invention further provides pharmaceutical formulations of the nucleic acids, proteins, and antibodies of the present invention.

[0017] In other aspects, the invention provides transgenic cells and non-human organisms comprising nucleic acids of any one or more of four novel human zinc-finger-containing genes—MDZ3, MDZ4, MDZ7, MDZ12a and MDZ12b—and transgenic cells and non-human organisms with targeted disruption of the endogenous orthologue of any of the four novel human Zinc-Finger-containing genes, MDZ3, MDZ4, MDZ7, MDZ12a and MDZ12b.

[0018] The invention additionally provides diagnostic, investigational, and therapeutic methods based on the nucleic acids, proteins, antibodies, mimetics, agonists, and antagonists of the present invention.

### BRIEF DESCRIPTION OF THE DRAWINGS

[0019] The above and other objects and advantages of the present invention will be apparent upon consideration of the following detailed description taken in conjunction with the accompanying drawings, in which like characters refer to like parts throughout, and in which:

[0020] FIGS. 1A-1C schematize the protein domain structure of MDZ3, including the overall structure of MDZ3 and the alignment of SCAN box and KRAB domain in MDZ3 with similar motifs;

[0021] FIG. 2 is a map showing the genomic structure of MDZ3 encoded at chromosome 7q22.1;

[0022] FIG. 3 presents the nucleotide and predicted amino acid sequences of MDZ3;

[0023] FIGS. 4A and 4B schematize the protein domain structure of MDZ4, including the overall structure of MDZ4 and the alignment of the SCAN box in MDZ4 with similar motifs;

[0024] FIG. 5 is a map showing the genomic structure of MDZ4 encoded at chromosome 6p21.3-22.2;

[0025] FIG. 6 presents the nucleotide and predicted amino acid sequences of MDZ4;

[0026] FIG. 7 schematizes the protein domain structure of MDZ7;

[0027] FIG. 8 is a map showing the genomic structure of MDZ7 encoded at chromosome 16p11.2;

[0028] FIG. 9 presents the nucleotide and predicted amino acid sequences of MDZ7;

[0029] FIGS. 10A and 10B schematize the protein domain structure of MDZ12, including the overall structure of MDZ12a and MDZ12bL (the longer ORF generated using the internal translation initiation site) and the alignment of the KRAB domain in MDZ12a with similar motifs;

[0030] FIG. 11 is a map showing the genomic structure of MDZ12a and MDZ12b encoded at chromosome 15q26.1;

[0031] FIG. 12 presents the nucleotide and predicted amino acid sequences of MDZ12a;

[0032] FIG. 13 presents the nucleotide and predicted amino acid sequences of MDZ12b;

[0033] FIG. 14 presents the RT-PCR analysis of the MDZ3 gene expression;

[0034] FIG. 15 presents the RT-PCR analysis of the MDZ7 gene expression; and

[0035] FIG. 16 presents the RT-PCR analysis of the MDZ12 gene expression.

### DETAILED DESCRIPTION OF THE INVENTION

[0036] Mining the sequence of the human genome for novel human genes, the present inventors have identified four novel human zinc-finger-containing genes: MDZ3, MDZ4, MDZ7 and MDZ12 (a and b). Each of the four genes acts as a sequence-specific nucleic acid binding regulatory protein, and plays a role in cell proliferation, differentiation and development. When expressed aberrantly, the genes contribute to neoplasia.

[0037] Detailed Description of the MDZ3 Gene

[0038] As schematized in FIG. 1, the protein product of the newly isolated MDZ3 gene shares certain protein domains and an overall structural organization with a family of other zinc-finger proteins. The shared structural features strongly imply that MDZ3 plays a role similar to that of the SCAN box- and KRAB motif-containing Kruppel family zinc-finger proteins as a sequence-specific nucleic acid binding regulatory protein, and is likely to participate in protein-protein interactions with other transcription modulators. Thus, MDZ3 is a clinically useful diagnostic marker and potential therapeutic agent for a variety of diseases, including developmental disorders and cancer.

[0039] In common with the other family members of the SCAN box containing Kruppel zinc-finger proteins, MDZ3 has a SCAN box near the N-terminus, which has been shown to participate in protein-protein interactions. The C-terminal region of the MDZ3 protein contains seven copies of C2H2 zinc fingers. There is also weak homology to KRAB domain in the middle of MDZ3.

[0040] FIG. 2 shows the genomic organization of MDZ3.

[0041] At the top is shown approximately 14 kb of the 177 kb bacterial artificial chromosome (BAC), with GenBank accession number, that spans the MDZ3 locus.

[0042] As shown in FIG. 2, MDZ3, encoding a protein of 544 amino acids, comprises exons 1-8. Predicted molecular weight of the protein, prior to any post-translational modification, is 61.4 kD.

[0043] As further discussed in the examples herein, expression of MDZ3 was assessed using RT-PCR analysis. RT-PCR product for MDZ3 was clearly produced from brain, testis, heart and bone marrow, but not from lung, liver, or skeletal muscle.

[0044] Detailed Description of the MDZ4 Gene

[0045] As schematized in FIG. 4, the product of the newly isolated MDZ4 gene shares certain protein domains and an overall structural organization with a family of zinc finger proteins. The shared structural features strongly imply that MDZ4 plays a role similar to those SCAN box-containing Kruppel family zinc-finger proteins as a potential transcription regulator, and is likely to participate in protein-protein interactions with other transcription modulators. Thus, MDZ4 is a clinically useful diagnostic marker and potential therapeutic agent for a variety of diseases, including developmental disorders and cancer.

[0046] In common with the other family members of the SCAN box-containing Kruppel zinc-finger proteins, MDZ4 has a SCAN box near the N-terminus, which has been shown to participate in protein-protein interactions. The C-terminal region of the MDZ4 protein contains five copies of C2H2 zinc fingers.

[0047] FIG. 5 shows the genomic organization of MDZ4.

[0048] At the top is shown about 9 kb of the 128 kb P1 artificial chromosome (PAC) (with GenBank accession number), that spans the MDZ4 locus. The genome-derived single-exon probe first used to demonstrate expression from this locus, is shown below the PAC and is labeled “500”; the 500 bp probe includes sequence drawn from exon two as well as flanking intron two.

[0049] As shown in FIG. 5, MDZ4, encoding a protein of 389 amino acids, is comprised of exons 1-4. Predicted molecular weight, prior to any post-translational modification, is 44.9 kD.

[0050] As further discussed in the examples herein, expression of MDZ4 was assessed using hybridization to genome-derived single exon microarrays. Microarray analysis of exons 2 and 3 showed expression in all tissues tested, including bone marrow, brain, heart, hela, adult liver, fetal liver, lung, placenta and prostate.

[0051] Detailed Description of the MDZ7 Gene

[0052] As schematized in FIG. 71 the newly isolated MDZ7 gene product is mainly composed of seven tandemly arrayed Kruppel-type (C2H2) zinc finger repeats. Such a structure implies that MDZ7 is likely to function in sequence-specific DNA binding and impart a regulatory effect on specific gene expression. Thus, MDZ7 is a clinically useful diagnostic marker and potential therapeutic agent for a variety of diseases, including developmental disorders and cancer.

[0053] FIG. 8 shows the genomic organization of MDZ7.

[0054] At the top is shown about 5.5 kb of the 121 kb bacterial artificial chromosome (BAC), with GenBank accession number, that spans the MDZ7 locus.

[0055] As shown in FIG. 8, MDZ7 is comprised of four exons and encodes a protein of 248 amino acids. Predicted molecular weight of the MDZ7 protein, prior to any post-translational modification, is 72.0 kD.

[0056] As further discussed in the examples herein, expression of MDZ7 was assessed using RT-PCR. RT-PCR analysis of MDZ7 showed expression only in testes, but not in brain, lung, liver, kidney, keletal muscle, heart, whole fetus, or Hela cells.

[0057] Detailed Description of the MDZ12 Gene

[0058] As schematized in FIG. 10A, and further shown in FIG. 11, the newly isolated MDZ12 encodes a MDZ12a insofar and potentially two other isoforms, which we designate 12bL (for “long”), and 12bS (for “short”); FIG. 10A shows the 12bL insofar. MDZ12a contains a partial KRAB motif as well as twelve C2H2 zinc fingers. MDZ12bL encodes a protein with 12 C2H2 zinc fingers. Such features strongly imply that MDZ12a (and MDZ12bL, if translated) plays a role as a potential transcription regulator, and is likely to participate in protein-protein interactions with other transcription modulators. Thus MDZ12 is a clinically useful diagnostic marker and potential therapeutic agent for a variety of diseases, including developmental disorders and cancer.

[0059] FIG. 11 shows the genomic organization of MDZ12.

[0060] At the top is shown a portion of the 173 kb bacterial artificial chromosome (BAC), with GenBank accession number, that spans the MDZ12 locus. The genome-derived single-exon probe first used to demonstrate expression from this locus includes sequence drawn solely from exon 4 of MDZ12a.

[0061] As shown in FIG. 11, MDZ12a encodes a protein of 483 amino acids, comprising exons 1-4. Predicted molecular weight of the protein, prior to any post-translational modification, is 55.1 kD. The inclusion of a novel exon between exons 2 and 3 introduces an inframe stop codon in MDZ12b, and thus MDZ12b encodes a short polypeptide of 44 amino acids (MDZ12bS). The use of an internal methionine as initiation methionine in MDZ12b could potentially further encode a 332 amino acid protein (MDZ12bL). The predicted molecular weight of the MDZ12bL protein, prior to any post-translational modification, is 38.2 kD.

[0062] As further discussed in the examples herein, expression of MDZ12 was assessed using RT-PCR. The abundance of PCR product indicates that MDZ12a is expressed in all tissues examined, with highest expression in brain, heart, skeletal muscle, testis and Hela cells. MDZ12b, however, is expressed with lower to much lower abundance compared with MDZ12a in bone marrow, brain, heart, kidney, placenta, skeletal muscle, testis and Hela cells with almost no expression in liver.

[0063] As more fully described below, the present invention provides isolated nucleic acids that encode MDZ3, MDZ4, MDZ7, MDZ12a and MDZ12b and fragments thereof. The invention further provides vectors for propagation and expression of the nucleic acids of the present invention, host cells comprising the nucleic acids and vectors of the present invention, proteins, protein fragments, and protein fusions of the present invention, and antibodies specific for all or any one of the isoforms. The invention provides pharmaceutical formulations of the nucleic acids, proteins, and antibodies of the present invention. The invention further provides transgenic cells and non-human organisms comprising human MDZ3, MDZ4, MDZ7 or MDZ12 nucleic acids, and transgenic cells and non-human organisms with targeted disruption of the endogenous orthologue of the human MDZ3, MDZ4, MDZ7 or MDZ12. The invention additionally provides diagnostic, investigational, and therapeutic methods based on the MDZ3, MDZ4, MDZ7, MDZ12 nucleic acids, proteins, and antibodies of the present invention.

[0064] Definitions

[0065] Unless defined otherwise, all technical and scientific terms used herein have the meaning commonly understood by one of ordinary skill in the art to which this invention belongs.

[0066] As used herein, “nucleic acid” (synonymously, “polynucleotide”) includes polynucleotides having natural nucleotides in native 5′-3′ phosphodiester linkage—e.g., DNA or RNA—as well as polynucleotides that have nonnatural nucleotide analogues, nonnative internucleoside bonds, or both, so long as the nonnatural polynucleotide is capable of sequence-discriminating basepairing under experimentally desired conditions. Unless otherwise specified, the term “nucleic acid” includes any topological conformation; the term thus explicitly comprehends single-stranded, double-stranded, partially duplexed, triplexed, hairpinned, circular, and padlocked conformations.

[0067] As used herein, an “isolated nucleic acid” is a nucleic acid molecule that exists in a physical form that is nonidentical to any nucleic acid molecule of identical sequence as found in nature; “isolated” does not require, although it does not prohibit, that the nucleic acid so described has itself been physically removed from its native environment.

[0068] For example, a nucleic acid can be said to be “isolated” when it includes nucleotides and/or internucleoside bonds not found in nature. When instead composed of natural nucleosides in phosphodiester linkage, a nucleic acid can be said to be “isolated” when it exists at a purity not found in nature, where purity can be adjudged with respect to the presence of nucleic acids of other sequence, with respect to the presence of proteins, with respect to the presence of lipids, or with respect the presence of any other component of a biological cell, or when the nucleic acid lacks sequence that flanks an otherwise identical sequence in an organism's genome, or when the nucleic acid possesses sequence not identically present in nature.

[0069] As so defined, “isolated nucleic acid” includes nucleic acids integrated into a host cell chromosome at a heterologous site, recombinant fusions of a native fragment to a heterologous sequence, recombinant vectors present as episomes or as integrated into a host cell chromosome.

[0070] As used herein, an isolated nucleic acid “encodes” a reference polypeptide when at least a portion of the nucleic acid, or its complement, can be directly translated to provide the amino acid sequence of the reference polypeptide, or when the isolated nucleic acid can be used, alone or as part of an expression vector, to express the reference polypeptide in vitro, in a prokaryotic host cell, or in a eukaryotic host cell.

[0071] As used herein, the term “exon” refers to a nucleic acid sequence found in genomic DNA that is bioinformatically predicted and/or experimentally confirmed to contribute contiguous sequence to a mature mRNA transcript.

[0072] As used herein, the phrase “open reading frame” and the equivalent acronym “ORF” refer to that portion of a transcript-derived nucleic acid that can be translated in its entirety into a sequence of contiguous amino acids. As so defined, an ORF has length, measured in nucleotides, exactly divisible by 3. As so defined, an ORF need not encode the entirety of a natural protein.

[0073] As used herein, the phrase “ORF-encoded peptide” refers to the predicted or actual translation of an ORF.

[0074] As used herein, the phrase “degenerate variant” of a reference nucleic acid sequence intends all nucleic acid sequences that can be directly translated, using the standard genetic code, to provide an amino acid sequence identical to that translated from the reference nucleic acid sequence.

[0075] As used herein, the term “microarray” and the equivalent phrase “nucleic acid microarray” refer to a substrate-bound collection of plural nucleic acids, hybridization to each of the plurality of bound nucleic acids being separately detectable. The substrate can be solid or porous, planar or non-planar, unitary or distributed.

[0076] As so defined, the term “microarray” and phrase “nucleic acid microarray” include all the devices so called in Schena (ed.), DNA Microarrays: A Practical Approach (Practical Approach Series), Oxford University Press (1999) (ISBN: 0199637768); Nature Genet. 21(1) (suppl):1-60 (1999); and Schena (ed.), Microarray Biochip: Tools and Technology, Eaton Publishing Company/BioTechniques Books Division (2000) (ISBN: 1881299376), the disclosures of which are incorporated herein by reference in their entireties.

[0077] As so defined, the term “microarray” and phrase “nucleic acid microarray” also include substrate-bound collections of plural nucleic acids in which the plurality of nucleic acids are distributably disposed on a plurality of beads, rather than on a unitary planar substrate, as is described, inter alia, in Brenner et al., Proc. Natl. Acad. Sci. USA 97(4):166501670 (2000), the disclosure of which is incorporated herein by reference in its entirety; in such case, the term “microarray” and phrase “nucleic acid microarray” refer to the plurality of beads in aggregate.

[0078] As used herein with respect to solution phase hybridization, the term “probe”, or equivalently, “nucleic acid probe” or “hybridization probe”, refers to an isolated nucleic acid of known sequence that is, or is intended to be, detectably labeled. As used herein with respect to a nucleic acid microarray, the term “probe” (or equivalently “nucleic acid probe” or “hybridization probe”) refers to the isolated nucleic acid that is, or is intended to be, bound to the substrate. In either such context, the term “target” refers to nucleic acid intended to be bound to probe by sequence complementarity.

[0079] As used herein, the expression “probe comprising SEQ ID NO:X”, and variants thereof, intends a nucleic acid probe, at least a portion of which probe has either (i) the sequence directly as given in the referenced SEQ ID NO:X, or (ii) a sequence complementary to the sequence as given in the referenced SEQ ID NO:X, the choice as between sequence directly as given and complement thereof dictated by the requirement that the probe be complementary to the desired target.

[0080] As used herein, the phrases “expression of a probe” and “expression of an isolated nucleic acid” and their linguistic equivalents intend that the probe or, (respectively, the isolated nucleic acid), or a probe (or, respectively, isolated nucleic acid) complementary in sequence thereto,can hybridize detectably under high stringency conditions to a sample of nucleic acids that derive from mRNA transcripts from a given source. For example, and by way of illustration only, expression of a probe in “liver” means that the probe can hybridize detectably under high stringency conditions to a sample of nucleic acids that derive from mRNA obtained from liver.

[0081] As used herein, “a single exon probe” comprises at least part of an exon (“reference exon”) and can hybridize detectably under high stringency conditions to transcript-derived nucleic acids that include the reference exon. The single exon probe will not, however, hybridize detectably under high stringency conditions to nucleic acids that lack the reference exon and that instead consist of one or more exons that are found adjacent to the reference exon in the genome.

[0082] For purposes herein, “high stringency conditions” are defined for solution phase hybridization as aqueous hybridization (i.e., free of formamide) in 6×SSC (where 20×SSC contains 3.0 M NaCl and 0.3 M sodium citrate), 1% SDS at 65° C. for at least 8 hours, followed by one or more washes in 0.2×SSC, 0.1% SDS at 65° C. “Moderate stringency conditions” are defined for solution phase hybridization as aqueous hybridization (i.e., free of formamide) in 6×SSC, 1% SDS at 65° C. for at least 8 hours, followed by one or more washes in 2×SSC, 0.1% SDS at room temperature.

[0083] For microarray-based hybridization, standard “high stringency conditions” are defined as hybridization in 50% formamide, 5×SSC, 0.2 μg/μl poly(dA), 0.2 μg/μl human cot1 DNA, and 0.5% SDS, in a humid oven at 42° C. overnight, followed by successive washes of the microarray in 1×SSC, 0.2% SDS at 55° C. for 5 minutes, and then 0.1×SSC, 0.2% SDS, at 55° C. for 20 minutes. For microarray-based hybridization, “moderate stringency conditions”, suitable for cross-hybridization to mRNA encoding structurally- and functionally-related proteins, are defined to be the same as those for high stringency conditions but with reduction in temperature for hybridization and washing to room temperature (approximately 25° C.).

[0084] As used herein, the terms “protein”, “polypeptide”, and “peptide” are used interchangeably to refer to a naturally-occurring or synthetic polymer of amino acid monomers (residues), irrespective of length, where amino acid monomer here includes naturally-occurring amino acids, naturally-occurring amino acid structural variants, and synthetic non-naturally occurring analogs that are capable of participating in peptide bonds. The terms “protein”, “polypeptide”, and “peptide” explicitly permits of post-translational and post-synthetic modifications, such as glycosylation.

[0085] The term “oligopeptide” herein denotes a protein, polypeptide, or peptide having 25 or fewer monomeric subunits.

[0086] The phrases “isolated protein”, “isolated polypeptide”, “isolated peptide” and “isolated oligopeptide” refer to a protein (or respectively to a polypeptide, peptide, or oligopeptide) that is nonidentical to any protein molecule of identical amino acid sequence as found in nature; “isolated” does not require, although it does not prohibit, that the protein so described has itself been physically removed from its native environment.

[0087] For example, a protein can be said to be “isolated” when it includes amino acid analogues or derivatives not found in nature, or includes linkages other than standard peptide bonds.

[0088] When instead composed entirely of natural amino acids linked by peptide bonds, a protein can be said to be “isolated” when it exists at a purity not found in nature—where purity can be adjudged with respect to the presence of proteins of other sequence, with respect to the presence of non-protein compounds, such as nucleic acids, lipids, or other components of a biological cell, or when it exists in a composition not found in nature, such as in a host cell that does not naturally express that protein.

[0089] A “purified protein” (equally, a purified polypeptide, peptide, or oligopeptide) is an isolated protein, as above described, present at a concentration of at least 95%, as measured on a weight basis with respect to total protein in a composition. A “substantially purified protein” (equally, a substantially purified polypeptide, peptide, or oligopeptide) is an isolated protein, as above described, present at a concentration of at least 70%, as measured on a weight basis with respect to total protein in a composition.

[0090] As used herein, the phrase “protein isoforms” refers to a plurality of proteins having nonidentical primary amino acid sequence but that share amino acid sequence encoded by at least one common exon.

[0091] As used herein, the phrase “alternative splicing” and its linguistic equivalents includes all types of RNA processing that lead to expression of plural protein isoforms from a single gene; accordingly, the phrase “splice variant(s)” and its linguistic equivalents embraces mRNAs transcribed from a given gene that, however processed, collectively encode plural protein isoforms. For example, and by way of illustration only, splice variants can include exon insertions, exon extensions, exon truncations, exon deletions, alternatives in the 5′ untranslated region (“5′ UT”) and alternatives in the 3′ untranslated region (“3′ UT”). Such 3′ alternatives include, for example, differences in the site of RNA transcript cleavage and site of poly(A) addition. See, e.g., Gautheret et al., Genome Res. 8:524-530 (1998).

[0092] As used herein, “orthologues” are separate occurrences of the same gene in multiple species. The separate occurrences have similar, albeit nonidentical, amino acid sequences, the degree of sequence similarity depending, in part, upon the evolutionary distance of the species from a common ancestor having the same gene.

[0093] As used herein, the term “paralogues” indicates separate occurrences of a gene in one species. The separate occurrences have similar, albeit nonidentical, amino acid sequences, the degree of sequence similarity depending, in part, upon the evolutionary distance from the gene duplication event giving rise to the separate occurrences.

[0094] As used herein, the term “homologues” is generic to “orthologues” and “paralogues”.

[0095] As used herein, the term “antibody” refers to a polypeptide, at least a portion of which is encoded by at least one immunoglobulin gene, or fragment thereof, and that can bind specifically to a desired target molecule. The term includes naturally-occurring forms, as well as fragments and derivatives.

[0096] Fragments within the scope of the term “antibody” include those produced by digestion with various proteases, those produced by chemical cleavage and/or chemical dissociation, and those produced recombinantly, so long as the fragment remains capable of specific binding to a target molecule. Among such fragments are Fab, Fab′, Fv, F(ab)′₂, and single chain Fv (scFv) fragments.

[0097] Derivatives within the scope of the term include antibodies (or fragments thereof) that have been modified in sequence, but remain capable of specific binding to a target molecule, including: interspecies chimeric and humanized antibodies; antibody fusions; heteromeric antibody complexes and antibody fusions, such as diabodies (bispecific antibodies), single-chain diabodies, and intrabodies (see, e.g., Marasco (ed.), Intracellular Antibodies: Research and Disease Applications, Springer-Verlag New York, Inc. (1998) (ISBN: 3540641513), the disclosure of which is incorporated herein by reference in its entirety).

[0098] As used herein, antibodies can be produced by any known technique, including harvest from cell culture of native B lymphocytes, harvest from culture of hybridomas, recombinant expression systems, and phage display.

[0099] As used herein, “antigen” refers to a ligand that can be bound by an antibody; an antigen need not itself be immunogenic. The portions of the antigen that make contact with the antibody are denominated “epitopes”.

[0100] “Specific binding” refers to the ability of two molecular species concurrently present in a heterogeneous (inhomogeneous) sample to bind to one another in preference to binding to other molecular species in the sample. Typically, a specific binding interaction will discriminate over adventitious binding interactions in the reaction by at least two-fold, more typically by at least 10-fold, often at least 100-fold; when used to detect analyte, specific binding is sufficiently discriminatory when determinative of the presence of the analyte in a heterogeneous (inhomogeneous) sample. Typically, the affinity or avidity of a specific binding reaction is least about 10⁻⁷ M, with specific binding reactions of greater specificity typically having affinity or avidity of at least 10⁻⁸ M to at least about 10⁻⁹ M.

[0101] As used herein, “molecular binding partners”—and equivalently, “specific binding partners”—refer to pairs of molecules, typically pairs of biomolecules, that exhibit specific binding. Nonlimiting examples are receptor and ligand, antibody and antigen, and biotin to any of avidin, streptavidin, neutrAvidin and captAvidin.

[0102] The term “antisense”, as used herein, refers to a nucleic acid molecule sufficiently complementary in sequence, and sufficiently long in that complementary sequence, as to hybridize under intracellular conditions to (i) a target mRNA transcript or (ii) the genomic DNA strand complementary to that transcribed to produce the target mRNA transcript.

[0103] The term “portion”, as used with respect to nucleic acids, proteins, and antibodies, is synonymous with “fragment”.

[0104] Nucleic Acid Molecules

[0105] In a first aspect, the invention provides isolated nucleic acids that encode MDZ3, MDZ4, MDZ7 or MDZ12, variants having at least 65% sequence identity thereto, degenerate variants thereof, variants that encode MDZ3, MDZ4, MDZ7 or MDZ12 proteins having conservative or moderately conservative substitutions, cross-hybridizing nucleic acids, and fragments thereof.

[0106] FIGS. 3, 6, 9, 12 and 13 present the nucleotide sequences of the MDZ3, MDZ4, MDZ7, MDZ12a and MDZ12b cDNA clones, respectively, with predicted amino acid translations. The sequences are further presented in the Sequence Listing, incorporated herein by reference in its entirety, in SEQ ID NOs: 1 (full length nucleotide sequence of human MDZ3 cDNA), 3 (full length amino acid sequence of MDZ3), 3027 (full length nucleotide sequence of human MDZ4 cDNA), 3029 (full length amino acid sequence of MDZ4), 4407 (full length nucleotide sequence of human MDZ7 cDNA), 4409 (full length amino acid sequence of MDZ7), 5770 (full length nucleotide sequence of human MDZ12a cDNA), 5772 (full length amino acid sequence of MDZ12a), 6938 (full length nucleotide sequence of human MDZ12b cDNA), 6939 (full length amino acid sequence of MDZ12bS) and 6940 (full length amino acid sequence of MDZ12bL).

[0107] Unless otherwise indicated, each nucleotide sequence is set forth herein as a sequence of deoxyribonucleotides. It is intended, however, that the given sequence be interpreted as would be appropriate to the polynucleotide composition: for example, if the isolated nucleic acid is composed of RNA, the given sequence intends ribonucleotides, with uridine substituted for thymidine.

[0108] Unless otherwise indicated, nucleotide sequences of the isolated nucleic acids of the present invention were determined by sequencing a DNA molecule that had resulted, directly or indirectly, from at least one enzymatic polymerization reaction (e.g., reverse transcription and/or polymerase chain reaction) using an automated sequencer (such as the MegaBACE™ 1000, Molecular Dynamics, Sunnyvale, Calif., USA), or by reliance upon such sequence or upon genomic sequence prior-accessioned into a public database. Unless otherwise indicated, all amino acid sequences of the polypeptides of the present invention were predicted by translation from the nucleic acid sequences so determined.

[0109] As a consequence, any nucleic acid sequence presented herein may contain errors introduced by erroneous incorporation of nucleotides during polymerization, by erroneous base calling by the automated sequencer (although such sequencing errors have been minimized for the nucleic acids directly determined herein, unless otherwise indicated, by the sequencing of each of the complementary strands of a duplex DNA), or by similar errors accessioned into the public database.

[0110] Accordingly, the MDZ3, MDZ4, MDZ7, MDZ12a and MDZ12b cDNA clones described herein have been separately deposited in a public repository (American Type Culture Collection, Manassas, Va., USA, “ATCC”). Each of the MDZ3, MDZ4, MDZ7 cDNA clones was sent for deposit to ATCC in a discrete tube on Aug. 1, 2001 and received by ATCC Aug. 2, 2001, and respectively accorded accession numbers of ______, ______, ______. The two splice variants of the MDZ12 gene—MDZ12a and MDZ12b—were sent for deposit in admixture in a single tube to ATCC on Aug. 1, 2001, received at ATCC on Aug. 2, 2001, and jointly accorded the single accession number ______. Any errors in sequence reported herein can be determined and corrected by sequencing nucleic acids propagated from the deposited clones using standard techniques.

[0111] Single nucleotide polymorphisms (SNPs) occur frequently in eukaryotic genomes—more than 1.4 million SNPs have already identified in the human genome, International Human Genome Sequencing Consortium, Nature 409:860-921 (2001)—and the sequence determined from one individual of a species may differ from other allelic forms present within the population. Additionally, small deletions and insertions, rather than single nucleotide polymorphisms, are not uncommon in the general population, and often do not alter the function of the protein.

[0112] Accordingly, it is an aspect of the present invention to provide nucleic acids not only identical in sequence to those described with particularity herein, but also to provide isolated nucleic acids at least about 65% identical in sequence to those described with particularity herein, typically at least about 70%, 75%, 80%, 85%, or 90% identical in sequence to those described with particularity herein, usefully at least about 91%, 92%, 93%, 94%, or 95% identical in sequence to those described with particularity herein, usefully at least about 96%, 97%, 98%, or 99% identical in sequence to those described with particularity herein, and, most conservatively, at least about 99.5%, 99.6%, 99.7%, 99.8% and 99.9% identical in sequence to those described with particularity herein. These sequence variants can be naturally occurring or can result from human intervention, as by random or directed mutagenesis.

[0113] For purposes herein, percent identity of two nucleic acid sequences is determined using the procedure of Tatiana et al., “Blast 2 sequences—a new tool for comparing protein and nucleotide sequences”, FEMS Microbiol Lett. 174:247-250 (1999), which procedure is effectuated by the computer program BLAST 2 SEQUENCES, available online at

[0114] http://www.ncbi.nlm.nih.gov/blast/bl2seq/bl2.html.

[0115] To assess percent identity of nucleic acids, the BLASTN module of BLAST 2 SEQUENCES is used with default values of (i) reward for a match: 1; (ii) penalty for a mismatch: −2; (iii) open gap 5 and extension gap 2 penalties; (iv) gap X_dropoff 50 expect 10 word size 11 filter, and both sequences are entered in their entireties.

[0116] As is well known, the genetic code is degenerate, with each amino acid except methionine translated from a plurality of codons, thus permitting a plurality of nucleic acids of disparate sequence to encode the identical protein. As is also well known, codon choice for optimal expression varies from species to species. The isolated nucleic acids of the present invention being useful for expression of MDZ3, MDZ4, MDZ7 or MDZ12 proteins and protein fragments, it is, therefore, another aspect of the present invention to provide isolated nucleic acids that encode MDZ3, MDZ4, MDZ7 or MDZ12 proteins and portions thereof not only identical in sequence to those described with particularity herein, but degenerate variants thereof as well.

[0117] As is also well known, amino acid substitutions occur frequently among natural allelic variants, with conservative substitutions often occasioning only de minimis change in protein function.

[0118] Accordingly, it is an aspect of the present invention to provide nucleic acids not only identical in sequence to those described with particularity herein, but also to provide isolated nucleic acids that encode MDZ3, MDZ4, MDZ7 or MDZ12, and portions thereof, having conservative amino acid substitutions, and also to provide isolated nucleic acids that encode MDZ3, MDZ4, MDZ7 or MDZ12, and portions thereof, having moderately conservative amino acid substitutions.

[0119] Although there are a variety of metrics for calling conservative amino acid substitutions, based primarily on either observed changes among evolutionarily related proteins or on predicted chemical similarity, for purposes herein a conservative replacement is any change having a positive value in the PAM250 log-likelihood matrix reproduced herein below (see Gonnet et al., Science 256(5062):1443-5 (1992)):

$$\begin{matrix} & A & R & N & D & C & Q & E & G & H & I & L & K & M & F & P & S & T & W & Y & V \\ A & 2 & - 1 & 0 & 0 & 0 & 0 & 0 & 0 & - 1 & - 1 & - 1 & 0 & - 1 & - 2 & 0 & 1 & 1 & - 4 & - 2 & 0 \\ R & - 1 & 5 & 0 & 0 & - 2 & 2 & 0 & - 1 & 1 & - 2 & - 2 & 3 & - 2 & - 3 & - 1 & 0 & 0 & - 2 & - 2 & - 2 \\ N & 0 & 0 & 4 & 2 & - 2 & 1 & 1 & 0 & 1 & - 3 & - 3 & 1 & - 2 & - 3 & - 1 & 1 & 0 & - 4 & - 1 & - 2 \\ D & 0 & 0 & 2 & 5 & - 3 & 1 & 3 & 0 & 0 & - 4 & - 4 & 0 & - 3 & - 4 & - 1 & 0 & 0 & - 5 & - 3 & - 3 \\ C & 0 & - 2 & - 2 & - 3 & 12 & - 2 & - 3 & - 2 & - 1 & - 1 & - 2 & - 3 & - 1 & - 1 & - 3 & 0 & 0 & - 1 & 0 & 0 \\ Q & 0 & 2 & 1 & 1 & - 2 & 3 & 2 & - 1 & 1 & - 2 & - 2 & 2 & - 1 & - 3 & 0 & 0 & 0 & - 3 & - 2 & - 2 \\ E & 0 & 0 & 1 & 3 & - 3 & 2 & 4 & - 1 & 0 & - 3 & - 3 & 1 & - 2 & - 4 & 0 & 0 & 0 & - 4 & - 3 & - 2 \\ G & 0 & - 1 & 0 & 0 & - 2 & - 1 & - 1 & 7 & - 1 & - 4 & - 4 & - 1 & - 4 & - 5 & - 2 & 0 & - 1 & - 4 & - 4 & - 3 \\ H & - 1 & 1 & 1 & 0 & - 1 & 1 & 0 & - 1 & 6 & - 2 & - 2 & 1 & - 1 & 0 & - 1 & 0 & 0 & - 1 & 2 & - 2 \\ I & - 1 & - 2 & - 3 & - 4 & - 1 & - 2 & - 3 & - 4 & - 2 & 4 & 3 & - 2 & 2 & 1 & - 3 & - 2 & - 1 & - 2 & - 1 & 3 \\ L & - 1 & - 2 & - 3 & - 4 & - 2 & - 2 & - 3 & - 4 & - 2 & 3 & 4 & - 2 & 3 & 2 & - 2 & - 2 & - 1 & - 1 & 0 & 2 \\ K & 0 & 3 & 1 & 0 & - 3 & 2 & 1 & - 1 & 1 & - 2 & - 2 & 3 & - 1 & - 3 & - 1 & 0 & 0 & - 4 & - 2 & - 2 \\ M & - 1 & - 2 & - 2 & - 3 & - 1 & - 1 & - 2 & - 4 & - 1 & 2 & 3 & - 1 & 4 & 2 & - 2 & - 1 & - 1 & - 1 & 0 & 2 \\ F & - 2 & - 3 & - 3 & - 4 & - 1 & - 3 & - 4 & - 5 & 0 & 1 & 2 & - 3 & 2 & 7 & - 4 & - 3 & - 2 & 4 & 5 & 0 \\ P & 0 & - 1 & - 1 & - 1 & - 3 & 0 & 0 & - 2 & - 1 & - 3 & - 2 & - 1 & - 2 & - 4 & 8 & 0 & 0 & - 5 & - 3 & - 2 \\ S & 1 & 0 & 1 & 0 & 0 & 0 & 0 & 0 & 0 & - 2 & - 2 & 0 & - 1 & - 3 & 0 & 2 & 2 & - 3 & - 2 & - 1 \\ T & 1 & 0 & 0 & 0 & 0 & 0 & 0 & - 1 & 0 & - 1 & - 1 & 0 & - 1 & - 2 & 0 & 2 & 2 & - 4 & - 2 & 0 \\ W & - 4 & - 2 & - 4 & - 5 & - 1 & - 3 & - 4 & - 4 & - 1 & - 2 & - 1 & - 4 & - 1 & 4 & - 5 & - 3 & - 4 & 14 & 4 & - 3 \\ Y & - 2 & - 2 & - 1 & - 3 & 0 & - 2 & - 3 & - 4 & 2 & - 1 & 0 & - 2 & 0 & 5 & - 3 & - 2 & - 2 & 4 & 8 & - 1 \\ V & 0 & - 2 & - 2 & - 3 & 0 & - 2 & - 2 & - 3 & - 2 & 3 & 2 & - 2 & 2 & 0 & - 2 & - 1 & 0 & - 3 & - 1 & 3\end{matrix}$$

[0120] For purposes herein, a “moderately conservative” replacement is any change having a nonnegative value in the PAM250 log-likelihood matrix reproduced herein above.

[0121] As is also well known in the art, relatedness of nucleic acids can also be characterized using a functional test, the ability of the two nucleic acids to base-pair to one another at defined hybridization stringencies.

[0122] It is, therefore, another aspect of the invention to provide isolated nucleic acids not only identical in sequence to those described with particularity herein, but also to provide isolated nucleic acids (“cross-hybridizing nucleic acids”) that hybridize under high stringency conditions (as defined herein below) to all or to a portion of various of the isolated MDZ3, MDZ4, MDZ7 or MDZ12 nucleic acids of the present invention (“reference nucleic acids”), as well as cross-hybridizing nucleic acids that hybridize under moderate stringency conditions to all or to a portion of various of the isolated MDZ3, MDZ4, MDZ7 or MDZ12 nucleic acids of the present invention.

[0123] Such cross-hybridizing nucleic acids are useful, inter alia, as probes for, and to drive expression of, proteins related to the proteins of the present invention as alternative isoforms, homologues, paralogues, and orthologues. Particularly useful orthologues are those from other primate species, such as chimpanzee, rhesus macaque, monkey, baboon, orangutan, and gorilla; from rodents, such as rats, mice, guinea pigs; from lagomorphs, such as rabbits; and from domestic livestock, such as cow, pig, sheep, horse, goat and chickens.

[0124] For purposes herein, high stringency conditions are defined as aqueous hybridization (i.e., free of formamide) in 6×SSC (where 20×SSC contains 3.0 M NaCl and 0.3 M sodium citrate), 1% SDS at 65° C. for at least 8 hours, followed by one or more washes in 0.2×SSC, 0.1% SDS at 65° C. For purposes herein, moderate stringency conditions are defined as aqueous hybridization (i.e., free of formamide) in 6×SSC, 1% SDS at 65° C. for at least 8 hours, followed by one or more washes in 2×SSC, 0.1% SDS at room temperature.

[0125] The hybridizing portion of the reference nucleic acid is typically at least 15 nucleotides in length, often at least 17 nucleotides in length. Often, however, the hybridizing portion of the reference nucleic acid is at least 20 nucleotides in length, 25 nucleotides in length, and even 30 nucleotides, 35 nucleotides, 40 nucleotides, and 50 nucleotides in length. Of course, cross-hybridizing nucleic acids that hybridize to a larger portion of the reference nucleic acid—for example, to a portion of at least 50 nt, at least 100 nt, at least 150 nt, 200 nt, 250 nt, 300 nt, 350 nt, 400 nt, 450 nt, or 500 nt or more—or even to the entire length of the reference nucleic acid, are also useful.

[0126] The hybridizing portion of the cross-hybridizing nucleic acid is at least 75% identical in sequence to at least a portion of the reference nucleic acid. Typically, the hybridizing portion of the cross-hybridizing nucleic acid is at least 80%, often at least 85%, 86%, 87%, 88%, 89% or even at least 90% identical in sequence to at least a portion of the reference nucleic acid. Often, the hybridizing portion of the cross-hybridizing nucleic acid will be at least 91%, 92%, 93%, 94%, 95%, 96%, 97%, 98%, or 99% identical in sequence to at least a portion of the reference nucleic acid sequence. At times, the hybridizing portion of the cross-hybridizing nucleic acid will be at least 99.5% identical in sequence to at least a portion of the reference nucleic acid.

[0127] The invention also provides fragments of various of the isolated nucleic acids of the present invention.

[0128] By “fragments” of a reference nucleic acid is here intended isolated nucleic acids, however obtained, that have a nucleotide sequence identical to a portion of the reference nucleic acid sequence, which portion is at least 17 nucleotides and less than the entirety of the reference nucleic acid. As so defined, “fragments” need not be obtained by physical fragmentation of the reference nucleic acid, although such provenance is not thereby precluded.

[0129] In theory, an oligonucleotide of 17 nucleotides is of sufficient length as to occur at random less frequently than once in the three gigabase human genome, and thus to provide a nucleic acid probe that can uniquely identify the reference sequence in a nucleic acid mixture of genomic complexity. As is well known, further specificity can be obtained by probing nucleic acid samples of subgenomic complexity, and/or by using plural fragments as short as 17 nucleotides in length collectively to prime amplification of nucleic acids, as, e.g., by polymerase chain reaction (PCR).

[0130] As further described herein below, nucleic acid fragments that encode at least 6 contiguous amino acids (i.e., fragments of 18 nucleotides or more) are useful in directing the expression or the synthesis of peptides that have utility in mapping the epitopes of the protein encoded by the reference nucleic acid. See, e.g., Geysen et al., “Use of peptide synthesis to probe viral antigens for epitopes to a resolution of a single amino acid,” Proc. Natl. Acad. Sci. USA 81:3998-4002 (1984); and U.S. Pat. Nos. 4,708,871 and 5,595,915, the disclosures of which are incorporated herein by reference in their entireties.

[0131] As further described herein below, fragments that encode at least 8 contiguous amino acids (i.e., fragments of 24 nucleotides or more) are useful in directing the expression or the synthesis of peptides that have utility as immunogens. See, e.g., Lerner, “Tapping the immunological repertoire to produce antibodies of predetermined specificity,” Nature 299:592-596 (1982); Shinnick et al., “Synthetic peptide immunogens as vaccines,” Annu. Rev. Microbiol. 37:425-46 (1983); Sutcliffe et al., “Antibodies that react with predetermined sites on proteins,” Science 219:660-6 (1983), the disclosures of which are incorporated herein by reference in their entireties.

[0132] The nucleic acid fragment of the present invention is thus at least 17 nucleotides in length, typically at least 18 nucleotides in length, and often at least 24 nucleotides in length. Often, the nucleic acid of the present invention is at least 25 nucleotides in length, and even 30 nucleotides, 35 nucleotides, 40 nucleotides, or 45 nucleotides in length. Of course, larger fragments having at least 50 nt, at least 100 nt, at least 150 nt, 200 nt, 250 nt, 300 nt, 350 nt, 400 nt, 450 nt, or 500 nt or more are also useful, and at times preferred.

[0133] Having been based upon the mining of genomic sequence, rather than upon surveillance of expressed message, the present invention further provides isolated genome-derived nucleic acids that include portions of the MDZ3, MDZ4, MDZ7 or MDZ12 gene.

[0134] The invention particularly provides genome-derived single exon probes.

[0135] As further described in commonly owned and copending U.S. patent application Ser. No. 09/864,761, filed May 23, 2001; Ser. No. 09/774,203, filed Jan. 29, 2001; and Ser. No. 09/632,366, filed Aug. 3, 2000, the disclosures of which are incorporated herein by reference in their entireties, “a single exon probe” comprises at least part of an exon (“reference exon”) and can hybridize detectably under high stringency conditions to transcript-derived nucleic acids that include the reference exon. The single exon probe will not, however, hybridize detectably under high stringency conditions to nucleic acids that lack the reference exon and instead consist of one or more exons that are found adjacent to the reference exon in the genome.

[0136] Genome-derived single exon probes typically further comprise, contiguous to a first end of the exon portion, a first intronic and/or intergenic sequence that is identically contiguous to the exon in the genome. Often, the genome-derived single exon probe further comprises, contiguous to a second end of the exonic portion, a second intronic and/or intergenic sequence that is identically contiguous to the exon in the genome.

[0137] The minimum length of genome-derived single exon probes is defined by the requirement that the exonic portion be of sufficient length to hybridize under high stringency conditions to transcript-derived nucleic acids. Accordingly, the exon portion is at least 17 nucleotides, typically at least 18 nucleotides, 20 nucleotides, 24 nucleotides, 25 nucleotides or even 30, 35, 40, 45, or 50 nucleotides in length, and can usefully include the entirety of the exon, up to 100 nt, 150 nt, 200 nt, 250 nt, 300 nt, 350 nt, 400 nt or even 500 nt or more in length.

[0138] The maximum length of genome-derived single exon probes is defined by the requirement that the probes contain portions of no more than one exon, that is, be unable to hybridize detectably under high stringency conditions to nucleic acids that lack the reference exon but include one or more exons that are found adjacent to the reference exon the genome.

[0139] Given variable spacing of exons through eukaryotic genomes, the maximum length of single exon probes of the present invention is typically no more than 25 kb, often no more than 20 kb, 15 kb, 10 kb or 7.5 kb, or even no more than 5 kb, 4 kb, 3 kb, or even no more than about 2.5 kb in length.

[0140] The genome-derived single exon probes of the present invention can usefully include at least a first terminal priming sequence not found in contiguity with the rest of the probe sequence in the genome, and often will contain a second terminal priming sequence not found in contiguity with the rest of the probe sequence in the genome.

[0141] The present invention also provides isolated genome-derived nucleic acids that include nucleic acid sequence elements that control transcription of the MDZ3, MDZ4, MDZ7 or MDZ12 gene.

[0142] With a complete draft of the human genome now available, genomic sequences that are within the vicinity of the MDZ3, MDZ4, MDZ7 or MDZ12 coding region (and that are additional to those described with particularity herein) can readily be obtained by PCR amplification.

[0143] The isolated nucleic acids of the present invention can be composed of natural nucleotides in native 5′-3′ phosphodiester internucleoside linkage—e.g., DNA or RNA—or can contain any or all of nonnatural nucleotide analogues, nonnative internucleoside bonds, or post-synthesis modifications, either throughout the length of the nucleic acid or localized to one or more portions thereof.

[0144] As is well known in the art, when the isolated nucleic acid is used as a hybridization probe, the range of such nonnatural analogues, nonnative internucleoside bonds, or post-synthesis modifications will be limited to those that permit sequence-discriminating basepairing of the resulting nucleic acid. When used to direct expression or RNA or protein in vitro or in vivo, the range of such nonnatural analogues, nonnative internucleoside bonds, or post-synthesis modifications will be limited to those that permit the nucleic acid to function properly as a polymerization substrate. When the isolated nucleic acid is used as a therapeutic agent, the range of such changes will be limited to those that do not confer toxicity upon the isolated nucleic acid.

[0145] For example, when desired to be used as probes, the isolated nucleic acids of the present invention can usefully include nucleotide analogues that incorporate labels that are directly detectable, such as radiolabels or fluorophores, or nucleotide analogues that incorporate labels that can be visualized in a subsequent reaction, such as biotin or various haptens.

[0146] Common radiolabeled analogues include those labeled with ³³p, ³²p, and ³⁵S , such as α-³²P-dATP, α-³²P-dCTP, α-³²P-dGTP, α-³²P-dTTP, α-³²P-3′dATP, α-³²P-ATP, α-³²P-CTP, α-³²P-GTP, α-³²P-UTP, α-³⁵S-dATP, γ-³⁵S-GTP γ-³³P-dATP, and the like.

[0147] Commercially available fluorescent nucleotide analogues readily incorporated into the nucleic acids of the present invention include Cy3-dCTP, Cy3-dUTP, Cy5-dCTP, Cy3-dUTP (Amersham Pharmacia Biotech, Piscataway, N.J., USA), fluorescein-12-dUTP, tetramethylrhodamine-6-dUTP, Texas Red®-5-dUTP, Cascade Blue®-7-dUTP, BODIPY® FL-14-dUTP, BODIPY® TMR-14-dUTP, BODIPY® TR-14-dUTP, Rhodamine Green™-5-dUTP, Oregon Green® 488-5-dUTP, Texas Red®-12-dUTP, BODIPY® 630/650-14-dUTP, BODIPY® 650/665-14-dUTP, Alexa Fluor® 488-5-dUTP, Alexa Fluor® 532-5-dUTP, Alexa Fluor® 568-5-dUTP, Alexa Fluor® 594-5-dUTP, Alexa Fluor® 546-14-dUTP, fluorescein-12-UTP, tetramethylrhodamine-6-UTP, Texas Red®-5-UTP, Cascade Blue®-7-UTP, BODIPY® FL-14-UTP, BODIPY® TMR-14-UTP, BODIPY® TR-14-UTP, Rhodamine Green™-5-UTP, Alexa Fluor® 488-5-UTP, Alexa Fluor® 546-14-UTP (Molecular Probes, Inc. Eugene, Oreg., USA).

[0148] Protocols are available for custom synthesis of nucleotides having other fluorophores. Henegariu et al., “Custom Fluorescent-Nucleotide Synthesis as an Alternative Method for Nucleic Acid Labeling,” Nature Biotechnol. 18:345-348 (2000), the disclosure of which is incorporated herein by reference in its entirety.

[0149] Haptens that are commonly conjugated to nucleotides for subsequent labeling include biotin (biotin-11-dUTP, Molecular Probes, Inc., Eugene, Oreg., USA; biotin-21-UTP, biotin-21-dUTP, Clontech Laboratories, Inc., Palo Alto, Calif., USA), digoxigenin (DIG-11-dUTP, alkali labile, DIG-11-UTP, Roche Diagnostics Corp., Indianapolis, Ind., USA), and dinitrophenyl (dinitrophenyl-11-dUTP, Molecular Probes, Inc., Eugene, Oreg., USA).

[0150] As another example, when desired to be used for antisense inhibition of transcription or translation, the isolated nucleic acids of the present invention can usefully include altered, often nuclease-resistant, internucleoside bonds. See Hartmann et al. (eds.), Manual of Antisense Methodology (Perspectives in Antisense Science), Kluwer Law International (1999) (ISBN:079238539X); Stein et al. (eds.), Applied Antisense Oligonucleotide Technology, Wiley-Liss (cover (1998) (ISBN: 0471172790); Chadwick et al. (eds.), Oligonucleotides as Therapeutic Agents—Symposium No. 209, John Wiley & Son Ltd (1997) (ISBN: 0471972797), the disclosures of which are incorporated herein by reference in their entireties. Such altered internucloside bonds are often desired also when the isolated nucleic acid of the present invention is to be used for or for targeted gene correction, Gamper et al., Nucl. Acids Res. 28(21):4332-4339 (2000), the disclosures of which are incorporated herein by reference in its entirety.

[0151] Modified oligonucleotide backbones often preferred when the nucleic acid is to be used for antisense purposes are, for example, phosphorothioates, chiral phosphorothioates, phosphorodithioates, phosphotriesters, aminoalkylphosphotriesters, methyl and other alkyl phosphonates including 3′-alkylene phosphonates and chiral phosphonates, phosphinates, phosphoramidates including 3′-amino phosphoramidate and aminoalkylphosphoramidates, thionophosphoramidates, thionoalkylphosphonates, thionoalkylphosphotriesters, and boranophosphates having normal 3′-5′ linkages, 2′-5′ linked analogs of these, and those having inverted polarity wherein the adjacent pairs of nucleoside units are linked 3′-5′ to 5′-3′ or 2′-5′ to 5′-2′. Representative U.S. patents that teach the preparation of the above phosphorus-containing linkages include, but are not limited to, U.S. Pat. Nos. 3,687,808; 4,469,863; 4,476,301; 5,023,243; 5,177,196; 5,188,897; 5,264,423; 5,276,019; 5,278,302; 5,286,717; 5,321,131; 5,399,676; 5,405,939; 5,453,496; 5,455,233; 5,466,677; 5,476,925; 5,519,126; 5,536,821; 5,541,306; 5,550,111; 5,563,253; 5,571,799; 5,587,361; and 5,625,050, the disclosures of which are incorporated herein by reference in their entireties.

[0152] Preferred modified oligonucleotide backbones for antisense use that do not include a phosphorus atom have backbones that are formed by short chain alkyl or cycloalkyl internucleoside linkages, mixed heteroatom and alkyl or cycloalkyl internucleoside linkages, or one or more short chain heteroatomic or heterocyclic internucleoside linkages. These include those having morpholino linkages (formed in part from the sugar portion of a nucleoside); siloxane backbones; sulfide, sulfoxide and sulfone backbones; formacetyl and thioformacetyl backbones; methylene formacetyl and thioformacetyl backbones; alkene containing backbones; sulfamate backbones; methyleneimino and methylenehydrazino backbones; sulfonate and sulfonamide backbones; amide backbones; and others having mixed N, O, S and CH₂ component parts. Representative U.S. patents that teach the preparation of the above backbones include, but are not limited to, U.S. Pat. Nos. 5,034,506; 5,166,315; 5,185,444; 5,214,134; 5,216,141; 5,235,033; 5,264,562; 5,264,564; 5,405,938; 5,434,257; 5,466,677; 5,470,967; 5,489,677; 5,541,307; 5,561,225; 5,596,086; 5,602,240; 5,610,289; 5,602,240; 5,608,046; 5,610,289; 5,618,704; 5,623,070; 5,663,312; 5,633,360; 5,677,437; and 5,677,439, the disclosures of which are incorporated herein by reference in their entireties.

[0153] In other preferred oligonucleotide mimetics, both the sugar and the internucleoside linkage are replaced with novel groups, such as peptide nucleic acids (PNA).

[0154] In PNA compounds, the phosphodiester backbone of the nucleic acid is replaced with an amide-containing backbone, in particular by repeating N-(2-aminoethyl) glycine units linked by amide bonds. Nucleobases are bound directly or indirectly to aza nitrogen atoms of the amide portion of the backbone, typically by methylene carbonyl linkages.

[0155] The uncharged nature of the PNA backbone provides PNA/DNA and PNA/RNA duplexes with a higher thermal stability than is found in DNA/DNA and DNA/RNA duplexes, resulting from the lack of charge repulsion between the PNA and DNA or RNA strand. In general, the Tm of a PNA/DNA or PNA/RNA duplex is 1° C. higher per base pair than the Tm of the corresponding DNA/DNA or DNA/RNA duplex (in 100 mM NaCl).

[0156] The neutral backbone also allows PNA to form stable DNA duplexes largely independent of salt concentration. At low ionic strength, PNA can be hybridized to a target sequence at temperatures that make DNA hybridization problematic or impossible. And unlike DNA/DNA duplex formation, PNA hybridization is possible in the absence of magnesium. Adjusting the ionic strength, therefore, is useful if competing DNA or RNA is present in the sample, or if the nucleic acid being probed contains a high level of secondary structure.

[0157] PNA also demonstrates greater specificity in binding to complementary DNA. A PNA/DNA mismatch is more destabilizing than DNA/DNA mismatch. A single mismatch in mixed a PNA/DNA 15-mer lowers the Tm by 8-20° C. (15° C. on average). In the corresponding DNA/DNA duplexes, a single mismatch lowers the Tm by 4-16° C. (11° C. on average). Because PNA probes can be significantly shorter than DNA probes, their specificity is greater.

[0158] Additionally, nucleases and proteases do not recognize the PNA polyamide backbone with nucleobase sidechains. As a result, PNA oligomers are resistant to degradation by enzymes, and the lifetime of these compounds is extended both in vivo and in vitro. In addition, PNA is stable over a wide pH range.

[0159] Because its backbone is formed from amide bonds, PNA can be synthesized using a modified peptide synthesis protocol. PNA oligomers can be synthesized by both Fmoc and tBoc methods. Representative U.S. patents that teach the preparation of PNA compounds include, but are not limited to, U.S. Pat. Nos. 5,539,082; 5,714,331; and 5,719,262, each of which is hereby incorporated herein by reference; automated PNA synthesis is readily achievable on commercial synthesizers (see, e.g., “PNA User's Guide,” Rev. 2, February 1998, Perseptive Biosystems Part No. 60138, Applied Biosystems, Inc., Foster City, Calif.).

[0160] PNA chemistry and applications are reviewed, inter alia, in Ray et al., FASEB J. 14(9):1041-60 (2000); Nielsen et al., Pharmacol Toxicol. 86(1):3-7 (2000); Larsen et al., Biochim Biophys Acta. 1489(1):159-66 (1999); Nielsen, Curr. Opin. Struct. Biol. 9(3):353-7 (1999), and Nielsen, Curr. Opin. Biotechnol. 10(1):71-5 (1999), the disclosures of which are incorporated herein by reference in their entireties.

[0161] Differences from nucleic acid compositions found in nature—e.g., nonnative bases, altered internucleoside linkages, post-synthesis modification—can be present throughout the length of the nucleic acid or can, instead, usefully be localized to discrete portions thereof. As an example of the latter, chimeric nucleic acids can be synthesized that have discrete DNA and RNA domains and demonstrated utility for targeted gene repair, as further described in U.S. Pat. Nos. 5,760,012 and 5,731,181, the disclosures of which are incorporated herein by reference in their entireties. As another example, chimeric nucleic acids comprising both DNA and PNA have been demonstrated to have utility in modified PCR reactions. See Misra et al., Biochem. 37: 1917-1925 (1998); see also Finn et al., Nucl. Acids Res. 24: 3357-3363 (1996), incorporated herein by reference.

[0162] Unless otherwise specified, nucleic acids of the present invention can include any topological conformation appropriate to the desired use; the term thus explicitly comprehends, among others, single-stranded, double-stranded, triplexed, quadruplexed, partially double-stranded, partially-triplexed, partially-quadruplexed, branched, hairpinned, circular, and padlocked conformations. Padlock conformations and their utilities are further described in Baner et al., Curr. Opin. Biotechnol. 12:11-15 (2001); Escude et al., Proc. Natl. Acad. Sci. USA 14;96(19):10603-7 (1999); Nilsson et al., Science 265(5181):2085-8 (1994), the disclosures of which are incorporated herein by reference in their entireties. Triplex and quadruplex conformations, and their utilities, are reviewed in Praseuth et al., Biochim. Biophys. Acta. 1489(1):181-206 (1999); Fox, Curr. Med. Chem. 7(1):17-37 (2000); Kochetkova et al., Methods Mol. Biol. 130:189-201 (2000); Chan et al., J. Mol. Med. 75(4):267-82 (1997), the disclosures of which are incorporated herein by reference in their entireties.

[0163] The nucleic acids of the present invention can be detectably labeled.

[0164] Commonly-used labels include radionuclides, such as ³²p, ³³p, 35S, ³H (and for NMR detection, ¹³C and ¹⁵N), haptens that can be detected by specific antibody or high affinity binding partner (such as avidin), and fluorophores.

[0165] As noted above, detectable labels can be incorporated by inclusion of labeled nucleotide analogues in the nucleic acid. Such analogues can be incorporated by enzymatic polymerization, such as by nick translation, random priming, polymerase chain reaction (PCR), terminal transferase tailing, and end-filling of overhangs, for DNA molecules, and in vitro transcription driven, e.g., from phage promoters, such as T7, T3, and SP6, for RNA molecules. Commercial kits are readily available for each such labeling approach.

[0166] Analogues can also be incorporated during automated solid phase chemical synthesis.

[0167] As is well known, labels can also be incorporated after nucleic acid synthesis, with the 5′ phosphate and 3′ hydroxyl providing convenient sites for post-synthetic covalent attachment of detectable labels.

[0168] Various other post-synthetic approaches permit internal labeling of nucleic acids.

[0169] For example, fluorophores can be attached using a cisplatin reagent that reacts with the N7 of guanine residues (and, to a lesser extent, adenine bases) in DNA, RNA, and PNA to provide a stable coordination complex between the nucleic acid and fluorophore label (Universal Linkage System) (available from Molecular Probes, Inc., Eugene, Oreg., USA and Amersham Pharmacia Biotech, Piscataway, N.J., USA); see Alers et al., Genes, Chromosomes & Cancer, Vol. 25, pp. 301-305 (1999); Jelsma et al., J. NIH Res. 5:82 (1994); Van Belkum et al., BioTechniques 16:148-153 (1994), incorporated herein by reference. As another example, nucleic acids can be labeled using a disulfide-containing linker (FastTag™ Reagent, Vector Laboratories, Inc., Burlingame, Calif., USA) that is photo- or thermally coupled to the target nucleic acid using aryl azide chemistry; after reduction, a free thiol is available for coupling to a hapten, fluorophore, sugar, affinity ligand, or other marker.

[0170] Multiple independent or interacting labels can be incorporated into the nucleic acids of the present invention.

[0171] For example, both a fluorophore and a moiety that in proximity thereto acts to quench fluorescence can be included to report specific hybridization through release of fluorescence quenching, Tyagi et al., Nature Biotechnol. 14: 303-308 (1996); Tyagi et al., Nature Biotechnol. 16, 49-53 (1998); Sokol et al., Proc. Natl. Acad. Sci. USA 95: 11538-11543 (1998); Kostrikis et al., Science 279:1228-1229 (1998); Marras et al., Genet. Anal. 14: 151-156 (1999); U.S. Pat. Nos. 5,846,726, 5,925,517, 5,925,517, or to report exonucleotidic excision, U.S. Pat. No. 5,538,848; Holland et al., Proc. Natl. Acad. Sci. USA 88:7276-7280 (1991); Heid et al., Genome Res. 6(10):986-94 (1996); Kuimelis et al., Nucleic Acids Symp Ser. (37):255-6 (1997); U.S. Pat. No. 5,723,591, the disclosures of which are incorporated herein by reference in their entireties.

[0172] So labeled, the isolated nucleic acids of the present invention can be used as probes, as further described below.

[0173] Nucleic acids of the present invention can also usefully be bound to a substrate. The substrate can porous or solid, planar or non-planar, unitary or distributed; the bond can be covalent or noncovalent. Bound to a substrate, nucleic acids of the present invention can be used as probes in their unlabeled state.

[0174] For example, the nucleic acids of the present invention can usefully be bound to a porous substrate, commonly a membrane, typically comprising nitrocellulose, nylon, or positively-charged derivatized nylon; so attached, the nucleic acids of the present invention can be used to detect MDZ3, MDZ4, MDZ7 or MDZ12 nucleic acids present within a labeled nucleic acid sample, either a sample of genomic nucleic acids or a sample of transcript-derived nucleic acids, e.g. by reverse dot blot.

[0175] The nucleic acids of the present invention can also usefully be bound to a solid substrate, such as glass, although other solid materials, such as amorphous silicon, crystalline silicon, or plastics, can also be used. Such plastics include polymethylacrylic, polyethylene, polypropylene, polyacrylate, polymethylmethacrylate, polyvinylchloride, polytetrafluoroethylene, polystyrene, polycarbonate, polyacetal, polysulfone, celluloseacetate, cellulosenitrate, nitrocellulose, or mixtures thereof.

[0176] Typically, the solid substrate will be rectangular, although other shapes, particularly disks and even spheres, present certain advantages. Particularly advantageous alternatives to glass slides as support substrates for array of nucleic acids are optical discs, as described in Demers, “Spatially Addressable Combinatorial Chemical Arrays in CD-ROM Format,” international patent publication WO 98/12559, incorporated herein by reference in its entirety.

[0177] The nucleic acids of the present invention can be attached covalently to a surface of the support substrate or applied to a derivatized surface in a chaotropic agent that facilitates denaturation and adherence by presumed noncovalent interactions, or some combination thereof.

[0178] The nucleic acids of the present invention can be bound to a substrate to which a plurality of other nucleic acids are concurrently bound, hybridization to each of the plurality of bound nucleic acids being separately detectable. At low density, e.g. on a porous membrane, these substrate-bound collections are typically denominated macroarrays; at higher density, typically on a solid support, such as glass, these substrate bound collections of plural nucleic acids are colloquially termed microarrays. As used herein, the term microarray includes arrays of all densities. It is, therefore, another aspect of the invention to provide microarrays that include the nucleic acids of the present invention.

[0179] The isolated nucleic acids of the present invention can be used as hybridization probes to detect, characterize, and quantify MDZ3, MDZ4, MDZ7 or MDZ12 nucleic acids in, and isolate MDZ3, MDZ4, MDZ7 or MDZ12 nucleic acids from, both genomic and transcript-derived nucleic acid samples. When free in solution, such probes are typically, but not invariably, detectably labeled; bound to a substrate, as in a microarray, such probes are typically, but not invariably unlabeled.

[0180] For example, the isolated nucleic acids of the present invention can be used as probes to detect and characterize gross alterations in the MDZ3, MDZ4, MDZ7 or MDZ12 genomic locus, such as deletions, insertions, translocations, and duplications of the MDZ3, MDZ4, MDZ7 or MDZ12 genomic locus through fluorescence in situ hybridization (FISH) to chromosome spreads. See, e.g., Andreeff et al. (eds.), Introduction to Fluorescence In Situ Hybridization: Principles and Clinical Applications, John Wiley & Sons (1999) (ISBN: 0471013455), the disclosure of which is incorporated herein by reference in its entirety. The isolated nucleic acids of the present invention can be used as probes to assess smaller genomic alterations using, e.g., Southern blot detection of restriction fragment length polymorphisms. The isolated nucleic acids of the present invention can be used as probes to isolate genomic clones that include the nucleic acids of the present invention, which thereafter can be restriction mapped and sequenced to identify deletions, insertions, translocations, and substitutions (single nucleotide polymorphisms, SNPs) at the sequence level.

[0181] The isolated nucleic acids of the present invention can also be used as probes to detect, characterize, and quantify MDZ3, MDZ4, MDZ7 or MDZ12 nucleic acids in, and isolate MDZ3, MDZ4, MDZ7 or MDZ12 nucleic acids from, transcript-derived nucleic acid samples.

[0182] For example, the isolated nucleic acids of the present invention can be used as hybridization probes to detect, characterize by length, and quantify MDZ3, MDZ4, MDZ7 or MDZ12 mRNA by northern blot of total or poly-A⁺-selected RNA samples. For example, the isolated nucleic acids of the present invention can be used as hybridization probes to detect, characterize by location, and quantify MDZ3, MDZ4, MDZ7 or MDZ12 message by in situ hybridization to tissue sections (see, e.g., Schwarchzacher et al., In Situ Hybridization, Springer-Verlag New York (2000) (ISBN: 0387915966), the disclosure of which is incorporated herein by reference in its entirety). For example, the isolated nucleic acids of the present invention can be used as hybridization probes to measure the representation of MDZ3, MDZ4, MDZ7 or MDZ12 clones in a cDNA library. For example, the isolated nucleic acids of the present invention can be used as hybridization probes to isolate MDZ3, MDZ4, MDZ7 or MDZ12 nucleic acids from cDNA libraries, permitting sequence level characterization of MDZ3, MDZ4, MDZ7 or MDZ12 messages, including identification of deletions, insertions, truncations—including deletions, insertions, and truncations of exons in alternatively spliced forms—and single nucleotide polymorphisms.

[0183] All of the aforementioned probe techniques are well within the skill in the art, and are described at greater length in standard texts such as Sambrook et al., Molecular Cloning: A Laboratory Manual (3^{rd} ed.), Cold Spring Harbor Laboratory Press (2001) (ISBN: 0879695773); Ausubel et al. (eds.), Short Protocols in Molecular Biology: A Compendium of Methods from Current Protocols in Molecular Biology (4^{th} ed.), John Wiley & Sons, 1999 (ISBN: 047132938X); and Walker et al. (eds.), The Nucleic Acids Protocols Handbook, Humana Press (2000) (ISBN: 0896034593), the disclosures of which are incorporated herein by reference in their entirety.

[0184] As described in the Examples herein below, the nucleic acids of the present invention can also be used to detect and quantify MDZ3, MDZ4, MDZ7 or MDZ12 nucleic acids in transcript-derived samples—that is, to measure expression of the MDZ3, MDZ4, MDZ7 or MDZ12 gene—when included in a microarray. Measurement of MDZ3, MDZ4, MDZ7 or MDZ12 expression has particular utility in diagnosis and treatment of a variety of diseases, including developmental disorders and cancer, as further described in the Examples herein below.

[0185] As would be readily apparent to one of skill in the art, each MDZ3, MDZ4, MDZ7 or MDZ12 nucleic acid probe—whether labeled, substrate-bound, or both—is thus currently available for use as a tool for measuring the level of MDZ3, MDZ4, MDZ7 or MDZ12 expression in each of the tissues in which expression has already been confirmed, notably testes for MDZ7, brain, testis, heart and bone marrow for MDZ3, bone marrow, brain, heart, hela, adult liver, fetal liver, lung, placenta and prostate for MDZ4, brain, heart, kidney, placenta, skeletal muscle, testis, Hela cells, bone marrow and liver for MDZ12. The utility is specific to the probe: under high stringency conditions, the probe reports the level of expression of message specifically containing that portion of the MDZ3, MDZ4, MDZ7 or MDZ12 gene included within the probe.

[0186] Measuring tools are well known in many arts, not just in molecular biology, and are known to possess credible, specific, and substantial utility. For example, U.S. Pat. No. 6,016,191 describes and claims a tool for measuring characteristics of fluid flow in a hydrocarbon well; U.S. Pat. No. 6,042,549 describes and claims a device for measuring exercise intensity; U.S. Pat. No. 5,889,351 describes and claims a device for measuring viscosity and for measuring characteristics of a fluid; U.S. Pat. No. 5,570,694 describes and claims a device for measuring blood pressure; U.S. Pat. No. 5,930,143 describes and claims a device for measuring the dimensions of machine tools; U.S. Pat. No. 5,279,044 describes and claims a measuring device for determining an absolute position of a movable element; U.S. Pat. No. 5,186,042 describes and claims a device for measuring action force of a wheel; and U.S. Pat. No. 4,246,774 describes and claims a device for measuring the draft of smoking articles such as cigarettes.

[0187] As for tissues not yet demonstrated to express MDZ3, MDZ4, MDZ7 or MDZ12, the MDZ3, MDZ4, MDZ7 or MDZ12 nucleic acid probes of the present invention are currently available as tools for surveying such tissues to detect the presence of MDZ3, MDZ4, MDZ7 or MDZ12 nucleic acids.

[0188] Survey tools—i.e., tools for determining the presence and/or location of a desired object by search of an area—are well known in many arts, not just in molecular biology, and are known to possess credible, specific, and substantial utility. For example, U.S. Pat. No. 6,046,800 describes and claims a device for surveying an area for objects that move; U.S. Pat. No. 6,025,201 describes and claims an apparatus for locating and discriminating platelets from non-platelet particles or cells on a cell-by-cell basis in a whole blood sample; U.S. Pat. No. 5,990,689 describes and claims a device for detecting and locating anomalies in the electromagnetic protection of a system; U.S. Pat. No. 5,984,175 describes and claims a device for detecting and identifying wearable user identification units; U.S. Pat. No. 3,980,986 (“Oil well survey tool”), describes and claims a tool for finding the position of a drill bit working at the bottom of a borehole.

[0189] As noted above, the nucleic acid probes of the present invention are useful in constructing microarrays; the microarrays, in turn, are products of manufacture that are useful for measuring and for surveying gene expression.

[0190] When included on a microarray, each MDZ3, MDZ4, MDZ7 or MDZ12 nucleic acid probe makes the microarray specifically useful for detecting that portion of the MDZ3, MDZ4, MDZ7 or MDZ12 gene included within the probe, thus imparting upon the microarray device the ability to detect a signal where, absent such probe, it would have reported no signal. This utility makes each individual probe on such microarray akin to an antenna, circuit, firmware or software element included in an electronic apparatus, where the antenna, circuit, firmware or software element imparts upon the apparatus the ability newly and additionally to detect signal in a portion of the radio-frequency spectrum where previously it could not; such devices are known to have specific, substantial, and credible utility.

[0191] Changes in the level of expression need not be observed for the measurement of expression to have utility.

[0192] For example, where gene expression analysis is used to assess toxicity of chemical agents on cells, the failure of the agent to change a gene's expression level is evidence that the drug likely does not affect the pathway of which the gene's expressed protein is a part. Analogously, where gene expression analysis is used to assess side effects of pharmacologic agents—whether in lead compound discovery or in subsequent screening of lead compound derivatives—the inability of the agent to alter a gene's expression level is evidence that the drug does not affect the pathway of which the gene's expressed protein is a part.

[0193] WO 99/58720, incorporated herein by reference in its entirety, provides methods for quantifying the relatedness of a first and second gene expression profile and for ordering the relatedness of a plurality of gene expression profiles, without regard to the identity or function of the genes whose expression is used in the calculation.

[0194] Gene expression analysis, including gene expression analysis by microarray hybridization, is, of course, principally a laboratory-based art. Devices and apparatus used principally in laboratories to facilitate laboratory research are well-established to possess specific, substantial, and credible utility. For example, U.S. Pat. No. 6,001,233 describes and claims a gel electrophoresis apparatus having a cam-activated clamp; for example, U.S. Pat. No. 6,051,831 describes and claims a high mass detector for use in time-of-flight mass spectrometers; for example, U.S. Pat. No. 5,824,269 describes and claims a flow cytometer—as is well known, few gel electrophoresis apparatuses, TOF-MS devices, or flow cytometers are sold for consumer use.

[0195] Indeed, and in particular, nucleic acid microarrays, as devices intended for laboratory use in measuring gene expression, are well-established to have specific, substantial and credible utility. Thus, the microarrays of the present invention have at least the specific, substantial and credible utilities of the microarrays claimed as devices and articles of manufacture in the following U.S. patents, the disclosures of each of which is incorporated herein by reference: U.S. Pat. No. 5,445,934 (“Array of oligonucleotides on a solid substrate”); U.S. Pat. No. 5,744,305 (“Arrays of materials attached to a substrate”); and U.S. Pat. No. 6,004,752 (“Solid support with attached molecules”).

[0196] Genome-derived single exon probes and genome-derived single exon probe microarrays have the additional utility, inter alia, of permitting high-throughput detection of splice variants of the nucleic acids of the present invention, as further described in copending and commonly owned U.S. patent application Ser. No. 09/632,366, filed Aug. 3, 2000, the disclosure of which is incorporated herein by reference in its entirety.

[0197] The isolated nucleic acids of the present invention can also be used to prime synthesis of nucleic acid, for purpose of either analysis or isolation, using mRNA, cDNA, or genomic DNA as template.

[0198] For use as primers, at least 17 contiguous nucleotides of the isolated nucleic acids of the present invention will be used. Often, at least 18, 19, or 20 contiguous nucleotides of the nucleic acids of the present invention will be used, and on occasion at least 20, 22, 24, or 25 contiguous nucleotides of the nucleic acids of the present invention will be used, and even 30 nucleotides or more of the nucleic acids of the present invention can be used to prime specific synthesis.

[0199] The nucleic acid primers of the present invention can be used, for example, to prime first strand cDNA synthesis on an mRNA template.

[0200] Such primer extension can be done directly to analyze the message. Alternatively, synthesis on an mRNA template can be done to produce first strand cDNA. The first strand cDNA can thereafter be used, inter alia, directly as a single-stranded probe, as above-described, as a template for sequencing—permitting identification of alterations, including deletions, insertions, and substitutions, both normal allelic variants and mutations associated with abnormal phenotypes—or as a template, either for second strand cDNA synthesis (e.g., as an antecedent to insertion into a cloning or expression vector), or for amplification.

[0201] The nucleic acid primers of the present invention can also be used, for example, to prime single base extension (SBE) for SNP detection (see, e.g., U.S. Pat. No. 6,004,744, the disclosure of which is incorporated herein by reference in its entirety).

[0202] As another example, the nucleic acid primers of the present invention can be used to prime amplification of MDZ3, MDZ4, MDZ7 or MDZ12 nucleic acids, using transcript-derived or genomic DNA as template.

[0203] Primer-directed amplification methods are now well-established in the art. Methods for performing the polymerase chain reaction (PCR) are compiled, inter alla, in McPherson, PCR (Basics: From Background to Bench), Springer Verlag (2000) (ISBN: 0387916008); Innis et al. (eds.), PCR Applications: Protocols for Functional Genomics, Academic Press (1999) (ISBN: 0123721857); Gelfand et al. (eds.), PCR Strategies, Academic Press (1998) (ISBN: 0123721822); Newton et al., PCR, Springer-Verlag New York (1997) (ISBN: 0387915060); Burke (ed.), PCR: Essential Techniques, John Wiley & Son Ltd (1996) (ISBN: 047195697X); White (ed.), PCR Cloning Protocols: From Molecular Cloning to Genetic Engineering, Vol. 67, Humana Press (1996) (ISBN: 0896033430); McPherson et al. (eds.), PCR 2: A Practical Approach, Oxford University Press, Inc. (1995) (ISBN: 0199634254), the disclosures of which are incorporated herein by reference in their entireties. Methods for performing RT-PCR are collected, e.g., in Siebert et al. (eds.), Gene Cloning and Analysis by RT-PCR, Eaton Publishing Company/Bio Techniques Books Division, 1998 (ISBN: 1881299147); Siebert (ed.), PCR Technique:RT-PCR, Eaton Publishing Company/BioTechniques Books (1995) (ISBN:1881299139), the disclosure of which is incorporated herein by reference in its entirety.

[0204] Isothermal amplification approaches, such as rolling circle amplification, are also now well-described. See, e.g., Schweitzer et al., Curr. Opin. Biotechnol. 12(1):21-7 (2001); U.S. Pat. Nos. 6,235,502, 6,221,603, 6,210,884, 6,183,960, 5,854,033, 5,714,320, 5,648,245, and international patent publications WO 97/19193 and WO 00/15779, the disclosures of which are incorporated herein by reference in their entireties. Rolling circle amplification can be combined with other techniques to facilitate SNP detection. See, e.g., Lizardi et al., Nature Genet. 19(3):225-32 (1998).

[0205] As further described below, nucleic acids of the present invention, inserted into vectors that flank the nucleic acid insert with a phage promoter, such as T7, T3, or SP6 promoter, can be used to drive in vitro expression of RNA complementary to either strand of the nucleic acid of the present invention. The RNA can be used, inter alla, as a single-stranded probe, in cDNA-mRNA subtraction, or for in vitro translation.

[0206] As will be further discussed herein below, nucleic acids of the present invention that encode MDZ3, MDZ4, MDZ7 or MDZ12 protein or portions thereof can be used, inter alia, to express the MDZ3, MDZ4, MDZ7 or MDZ12 proteins or protein fragments, either alone, or as part of fusion proteins.

[0207] Expression can be from genomic nucleic acids of the present invention, or from transcript-derived nucleic acids of the present invention.

[0208] Where protein expression is effected from genomic DNA, expression will typically be effected in eukaryotic, typically mammalian, cells capable of splicing introns from the initial RNA transcript. Expression can be driven from episomal vectors, such as EBV-based vectors, or can be effected from genomic DNA integrated into a host cell chromosome. As will be more fully described below, where expression is from transcript-derived (or otherwise intron-less) nucleic acids of the present invention, expression can be effected in wide variety of prokaryotic or eukaryotic cells.

[0209] Expressed in vitro, the protein, protein fragment, or protein fusion can thereafter be isolated, to be used, inter alia, as a standard in immunoassays specific for the proteins, or protein isoforms, of the present invention; to be used as a therapeutic agent, e.g., to be administered as passive replacement therapy in individuals deficient in the proteins of the present invention, or to be administered as a vaccine; to be used for in vitro production of specific antibody, the antibody thereafter to be used, e.g., as an analytical reagent for detection and quantitation of the proteins of the present invention or to be used as an immunotherapeutic agent.

[0210] The isolated nucleic acids of the present invention can also be used to drive in vivo expression of the proteins of the present invention. In vivo expression can be driven from a vector—typically a viral vector, often a vector based upon a replication incompetent retrovirus, an adenovirus, or an adeno-associated virus (AAV)—for purpose of gene therapy. In vivo expression can also be driven from signals endogenous to the nucleic acid or from a vector, often a plasmid vector, such as pVAX1 (Invitrogen, Carlsbad Calif., USA), for purpose of “naked” nucleic acid vaccination, as further described in U.S. Pat. Nos. 5,589,466; 5,679,647; 5,804,566; 5,830,877; 5,843,913; 5,880,104; 5,958,891; 5,985,847; 6,017,897; 6,110,898; 6,204,250, the disclosures of which are incorporated herein by reference in their entireties.

[0211] The nucleic acids of the present invention can also be used for antisense inhibition of transcription or translation. See Phillips (ed.), Antisense Technology, Part B, Methods in Enzymology Vol. 314, Academic Press, Inc. (1999) (ISBN: 012182215X); Phillips (ed.), Antisense Technology, Part A, Methods in Enzymology Vol. 313, Academic Press, Inc. (1999) (ISBN: 0121822141); Hartmann et al. (eds.), Manual of Antisense Methodology (Perspectives in Antisense Science), Kluwer Law International (1999) (ISBN:079238539X); Stein et al. (eds.), Applied Antisense Oligonucleotide Technology, Wiley-Liss (cover (1998) (ISBN: 0471172790); Agrawal et al. (eds.), Antisense Research and Application, Springer-Verlag New York, Inc. (1998) (ISBN: 3540638334); Lichtenstein et al. (eds.), Antisense Technology: A Practical Approach, Vol. 185, Oxford University Press, INC. (1998) (ISBN: 0199635838); Gibson (ed.), Antisense and Ribozyme Methodology: Laboratory Companion, Chapman & Hall (1997) (ISBN: 3826100794); Chadwick et al. (eds.), Oligonucleotides as Therapeutic Agents—Symposium No. 209, John Wiley & Son Ltd (1997) (ISBN: 0471972797), the disclosures of which are incorporated herein by reference in their entireties.

[0212] Nucleic acids of the present invention, particularly cDNAs of the present invention, that encode full-length human MDZ3, MDZ4, MDZ7 or MDZ12 protein isoforms, have additional, well-recognized, immediate, real world utility as commercial products of manufacture suitable for sale.

[0213] For example, Invitrogen Corp. (Carlsbad, Calif., USA), through its Research Genetics subsidiary, sells full length human cDNAs cloned into one of a selection of expression vectors as GeneStorm® expression-ready clones; utility is specific for the gene, since each gene is capable of being ordered separately and has a distinct catalogue number, and utility is substantial, each clone selling for $650.00 US. Similarly, Incyte Genomics (Palo Alto, Calif., USA) sells clones from public and proprietary sources in multi-well plates or individual tubes.

[0214] Nucleic acids of the present invention that include genomic regions encoding the human MDZ3, MDZ4, MDZ7 or MDZ12 protein, or portions thereof, have yet further utilities.

[0215] For example, genomic nucleic acids of the present invention can be used as amplification substrates, e.g. for preparation of genome-derived single exon probes of the present invention, as described above and in copending and commonly-owned U.S. patent application Ser. No. 09/864,761, filed May 23, 2001, Ser. No. 09/774,203, filed Jan. 29, 2001, and Ser. No. 09/632,366, filed Aug. 3, 2000, the disclosures of which are incorporated herein by reference in their entireties.

[0216] As another example, genomic nucleic acids of the present invention can be integrated non-homologously into the genome of somatic cells, e.g. CHO cells, COS cells, or 293 cells, with or without amplification of the insertional locus, in order, e.g., to create stable cell lines capable of producing the proteins of the present invention.

[0217] As another example, more fully described herein below, genomic nucleic acids of the present invention can be integrated nonhomologously into embryonic stem (ES) cells to create transgenic non-human animals capable of producing the proteins of the present invention.

[0218] Genomic nucleic acids of the present invention can also be used to target homologous recombination to the human MDZ3, MDZ4, MDZ7 or MDZ12 locus, respectively. See, e.g., U.S. Pat. Nos. 6,187,305; 6,204,061; 5,631,153; 5,627,059; 5,487,992; 5,464,764; 5,614,396; 5,527,695 and 6,063,630; and Kmiec et al. (eds.), Gene Targeting Protocols, Vol. 133, Humana Press (2000) (ISBN: 0896033600); Joyner (ed.), Gene Targeting: A Practical Approach, Oxford University Press, Inc. (2000) (ISBN: 0199637938); Sedivy et al., Gene Targeting, Oxford University Press (1998) (ISBN: 071677013X); Tymms et al. (eds.), Gene Knockout Protocols, Humana Press (2000) (ISBN: 0896035727); Mak et al. (eds.), The Gene Knockout FactsBook, Vol. 2, Academic Press, Inc. (1998) (ISBN: 0124660444); Torres et al., Laboratory Protocols for Conditional Gene Targeting, Oxford University Press (1997) (ISBN: 019963677X); Vega (ed.), Gene Targeting, CRC Press, LLC (1994) (ISBN: 084938950X), the disclosures of which are incorporated herein by reference in their entireties.

[0219] Where the genomic region includes transcription regulatory elements, homologous recombination can be used to alter the expression of MDZ3, MDZ4, MDZ7 or MDZ12, both for purpose of in vitro production of MDZ3, MDZ4, MDZ7 or MDZ12 protein from human cells, and for purpose of gene therapy. See, e.g., U.S. Pat. Nos. 5,981,214, 6,048,524; 5,272,071.

[0220] Fragments of the nucleic acids of the present invention smaller than those typically used for homologous recombination can also be used for targeted gene correction or alteration, possibly by cellular mechanisms different from those engaged during homologous recombination.

[0221] For example, partially duplexed RNA/DNA chimeras have been shown to have utility in targeted gene correction, U.S. Pat. Nos. 5,945,339, 5,888,983, 5,871,984, 5,795,972, 5,780,296, 5,760,012, 5,756,325, 5,731,181, the disclosures of which are incorporated herein by reference in their entireties. So too have small oligonucleotides fused to triplexing domains have been shown to have utility in targeted gene correction, Culver et al., “Correction of chromosomal point mutations in human cells with bifunctional oligonucleotides,” Nature Biotechnol. 17(10):989-93 (1999), as have oligonucleotides having modified terminal bases or modified terminal internucleoside bonds, Gamper et al., Nucl. Acids Res. 28(21):4332-9 (2000), the disclosures of which are incorporated herein by reference.

[0222] The isolated nucleic acids of the present invention can also be used to provide the initial substrate for recombinant engineering of MDZ3, MDZ4, MDZ7 or MDZ12 protein variants having desired phenotypic improvements. Such engineering includes, for example, site-directed mutagenesis, random mutagenesis with subsequent functional screening, and more elegant schemes for recombinant evolution of proteins, as are described, inter alia, in U.S. Pat. Nos. 6,180,406; 6,165,793; 6,117,679; and 6,096,548, the disclosures of which are incorporated herein by reference in their entireties.

[0223] Nucleic acids of the present invention can be obtained by using the labeled probes of the present invention to probe nucleic acid samples, such as genomic libraries, cDNA libraries, and mRNA samples, by standard techniques. Nucleic acids of the present invention can also be obtained by amplification, using the nucleic acid primers of the present invention, as further demonstrated in Example 1, herein below. Nucleic acids of the present invention of fewer than about 100 nt can also be synthesized chemically, typically by solid phase synthesis using commercially available automated synthesizers.

[0224] “Full Length” Human MDZ3, MDZ4, MDZ7 or MDZ12 Nucleic Acids

[0225] In a first series of nucleic acid embodiments, the invention provides isolated nucleic acids that encode the entirety of the MDZ3, MDZ4, MDZ7 or MDZ12a, MDZ12bS, MDZ12bL protein. As discussed above, the “full-length” nucleic acids of the present invention can be used, inter alia, to express full length MDZ3, MDZ4, MDZ7 or MDZ12a, MDZ12bS, MDZ12bL protein. The full-length nucleic acids can also be used as nucleic acid probes; used as probes, the isolated nucleic acids of these embodiments will respectively hybridize to MDZ3, MDZ4, MDZ7 or MDZ12, or to portions thereof.

[0226] In a first such embodiment, the invention provides an isolated nucleic acid comprising (i) the nucleotide sequence of the nucleic acid of any of ATCC deposits ______ (MDZ3), ______ (MDZ4), ______ (MDZ7), and ______ (MDZ12a and MDZ12b), (ii) the nucleotide sequence of any of SEQ ID NOs: 1, 3027, 4407, 5770, 6938 or (iii) the complement of (i) or (ii). The ATCC deposits have, and SEQ ID Nos: 1, 3027, 4407, 5770, 6938 present, the entire cDNA of MDZ3, MDZ4, MDZ7, and MDZ12a and MDZ12b, respectively, including the 5′ untranslated (UT) region and 3′ UT (except for MDZ12b).

[0227] In a second embodiment, the invention provides an isolated nucleic acid comprising (i) the nucleotide sequence of SEQ ID Nos: 2, 3028, 4408, 5771, (ii) a degenerate variant of the nucleotide sequence of SEQ ID Nos: 2, 3028, 4408, 5771, or (iii) the complement of (i) or (ii). SEQ ID Nos: 2, 3028, 4408, 5771 present the open reading frame (ORF) from SEQ ID Nos: 1, 3027, 4407, 5770, respectively.

[0228] In a third embodiment, the invention provides an isolated nucleic acid of no more than about 100 kb, often no more than about 75 kb, typically no more than about 50 kb, and usefully no more than about 25 kb, even no more than about 10 kb, comprising (i) a nucleotide sequence that encodes a polypeptide with the amino acid sequence of any of SEQ ID Nos: 3, 3029, 4409, 5772, 6939, or 6940, or (ii) the complement of a nucleotide sequence that encodes a polypeptide with the amino acid sequence of any of SEQ ID Nos: 3, 3029, 4409, 5772, 6939, or 6940. SEQ ID Nos: 3, 3029, 4409, 5772, 6939, 6940 provide the amino acid sequence of MDZ3, MDZ4, MDZ7, MDZ12a, MDZ12bS and MDZ12bL, respectively.

[0229] In a fourth embodiment, the invention provides an isolated nucleic acid of no more than about 100 kb, often no more than about 75 kb, typically no more than about 50 kb, and usefully no more than about 25 kb, even no more than about 10 kb, having a nucleotide sequence that (i) encodes a polypeptide having the sequence of any of SEQ ID NOs: 3, 3029, 4409, 5772, 6939, or 6940 with conservative amino acid substitutions, (ii) encodes a polypeptide having the sequence of any of SEQ ID Nos: 3, 3029, 4409, 5772, 6939, or 6940 with moderately conservative amino acid substitutions, or (iii) the complement of (i) or (ii).

[0230] Selected Partial Nucleic Acids

[0231] In a second series of nucleic acid embodiments, the invention provides isolated nucleic acids that encode select portions of MDZ3, MDZ4, MDZ7 and MDZ12, respectively. As will be further discussed herein below, these “partial” nucleic acids can be used, inter alia, to express specific portions of MDZ3, MDZ4, MDZ7 and MDZ12, respectively. These “partial” nucleic acids can also be used, inter alia, as nucleic probes.

[0232] Selected Partial Nucleic Acids of MDZ3

[0233] In a first such embodiment, the invention provides an isolated nucleic acid comprising (i) the nucleotide sequence of SEQ ID NO: 4, (ii) the nucleotide sequence of SEQ ID NO:5, (iii) the nucleotide sequence of SEQ ID NO:6, (iv) a degenerate variant of SEQ ID NO:6, or (v) the complement of any of (i)-(iv). SEQ ID NO: 4 presents that portion of MDZ3 not present in known ESTs, with SEQ ID NO:5 representing the 5′ UT portion of SEQ ID NO:4 and SEQ ID NO:6 representing the coding region of SEQ ID NO:4. Often, the isolated nucleic acids of this embodiment are no more than about 100 kb in length, often no more than about 75 kb in length, or 50 kb, or even 25 kb in length, and can be no more than about 15 kb in length, and frequently no more than about 10 kb in length.

[0234] In another embodiment, the invention provides an isolated nucleic acid comprising (i) a nucleotide sequence that encodes SEQ ID NO: 7 or (ii) the complement of a nucleotide sequence that encodes SEQ ID NO: 7, wherein the isolated nucleic acid is no more than about 100 kb in length, often no more than about 75 kb in length, or 50 kb, or even 25 kb in length, and can be no more than about 15 kb in length, and frequently no more than about 10 kb in length.

[0235] SEQ ID NO: 7 is the amino acid sequence encoded by SEQ ID NO:6.

[0236] In another embodiment, the invention provides an isolated nucleic acid comprising (i) a nucleotide sequence that encodes SEQ ID NO: 7 with conservative substitutions, (ii) a nucleotide sequence that encodes SEQ ID NO: 7 with moderately conservative substititions, or (iii) the complement of (i) or (ii), wherein the isolated nucleic acid is no more than about 100 kb in length, often no more than about 75 kb in length, or 50 kb, or even 25 kb in length, and can be no more than about 15 kb in length, and frequently no more than about 10 kb in length.

[0237] Selected Partial Nucleic Acids of MDZ4

[0238] In a first such embodiment, the invention provides an isolated nucleic acid comprising (i) the nucleotide sequence of SEQ ID NO: 3030, (ii) the nucleotide sequence of SEQ ID NO: 3031, (iii) the nucleotide sequence of SEQ ID NO: 3032, (iv) a degenerate variant of the nucleotide sequence of SEQ ID NO: 3032, or (v) the complement of any of (i)-(iv). SEQ ID NO: 3030 presents a portion of MDZ4 not present in known ESTs, with SEQ ID NO:3031 representing the 5′ UT portion of SEQ ID NO:3030 and SEQ ID NO:6 representing the coding region of SEQ ID NO:3030, wherein the isolated nucleic acids of this embodiment are no more than about 100 kb in length, often no more than about 75 kb in length, or 50 kb, or even 25 kb in length, and can be no more than about 15 kb in length, and frequently no more than about 10 kb in length.

[0239] In another embodiment, the invention provides an isolated nucleic acid comprising (i) a nucleotide sequence that encodes SEQ ID NO: 3033 or (ii) the complement of a nucleotide sequence that encodes SEQ ID NO: 3033, wherein the isolated nucleic acid is no more than about 100 kb in length, typically no more than about 75 kb in length, frequently no more than about 50 kb in length. SEQ ID NO: 3033 is the amino acid sequence encoded by that portion of MDZ4 not present in known EST fragments. Often, the isolated nucleic acids of this embodiment are no more than about 25 kb in length, often no more than about 15 kb in length, and frequently no more than about 10 kb in length.

[0240] In another embodiment, the invention provides an isolated nucleic acid comprising (i) a nucleotide sequence that encodes SEQ ID NO: 3033 with conservative substititions, (ii) a nucleotide sequence that encodes SEQ ID NO:3033 with moderately conservative substitions, or (iii) the complement of (i) or (ii), wherein the isolated nucleic acid is no more than about 100 kb in length, typically no more than about 75 kb in length, and often no more than about 50 kb in length. Often, the isolated nucleic acids of this embodiment are no more than about 25 kb in length, often no more than about 15 kb in length, and frequently no more than about 10 kb in length. In another embodiment, the invention provides an isolated nucleic acid comprising (i) the nucleotide sequence of SEQ ID NO: 3034, (ii) the nucleotide sequence of SEQ ID NO: 3035, (iii) a degenerate variant of the nucleotide sequence of SEQ ID NO:3035, (iv) the nucleotide sequence of SEQ ID NO:3036, or (v) the complement of any of (i)-(iv), wherein the isolated nucleic acid is no more than about 100 kb in length, typically no more than about 75 kb in length, and often no more than about 50 kb in length. Often, the isolated nucleic acids of this embodiment are no more than about 25 kb in length, often no more than about 15 kb in length, and frequently no more than about 10 kb in length.

[0241] SEQ ID NO: 3034 presents a portion of MDZ4 not present in known ESTs, with SEQ ID NO:3035 representing a coding region portion of SEQ ID NO:3034, and with SEQ ID NO:3036 representing the 3′ UT portion of SEQ ID NO:3034.

[0242] In another embodiment, the invention provides an isolated nucleic acid comprising (i) a nucleotide sequence that encodes SEQ ID NO: 3037 or (ii) the complement of a nucleotide sequence that encodes SEQ ID NO: 3037, wherein the isolated nucleic acid is no more than about 100 kb in length, typically no more than about 75 kb in length, frequently no more than about 50 kb in length. SEQ ID NO: 3037 is the amino acid sequence encoded by SEQ ID NO:3035. Often, the isolated nucleic acids of this embodiment are no more than about 25 kb in length, often no more than about 15 kb in length, and frequently no more than about 10 kb in length.

[0243] In another embodiment, the invention provides an isolated nucleic acid comprising (i) a nucleotide sequence that encodes SEQ ID NO: 3037 with conservative substitutions, (ii) a nucleotide sequence that encodes SEQ ID NO: 3037 with moderately conservative substitutions, or (iii) the complement of (i) or (ii), wherein the isolated nucleic acid is no more than about 100 kb in length, typically no more than about 75 kb in length, and often no more than about 50 kb in length. Often, the isolated nucleic acids of this embodiment are no more than about 25 kb in length, often no more than about 15 kb in length, and frequently no more than about 10 kb in length.

[0244] Selected Partial Nucleic Acids of MDZ7

[0245] In a first such embodiment, the invention provides an isolated nucleic acid comprising the nucleotide sequence of SEQ ID NO: 4410 or SEQ ID NO:4411, or the complement thereof, wherein the isolated nucleic acid of this aspect of the invention is no more than about 100 kb in length, often no more than about 75 kb in length, more typically no more than about 50 kb length. Often, the isolated nucleic acids of this embodiment are no more than about 25 kb in length, often no more than about 15 kb in length, and frequently no more than about 10 kb in length.

[0246] SEQ ID Nos: 4410 and 4411 present those portions of MDZ7 not present in known ESTs.

[0247] Selected Partial Nucleic Acids of MDZ12

[0248] In a first such embodiment, the invention provides an isolated nucleic acid comprising (i) the nucleotide sequence of SEQ ID NO: 5773, (ii) a degenerate variant of SEQ ID NO: 5773, or (iii) the complement of (i) or (ii), wherein the isolated nucleic acid is no more than about 100 kb in length, typically no more than about 75 kb in length, more typically no more than about 50 kb length. Often, the isolated nucleic acids of this embodiment are no more than about 25 kb in length, often no more than about 15 kb in length, and frequently no more than about 10 kb in length.

[0249] SEQ ID NO: 5773 encodes a portion of MDZ12a not present in known ESTs.

[0250] In another embodiment, the invention provides an isolated nucleic acid comprising (i) a nucleotide sequence that encodes SEQ ID NO: 5774 or (ii) the complement of a nucleotide sequence that encodes SEQ ID NO: 5774, wherein the isolated nucleic acid is no more than about 100 kb in length, typically no more than about 75 kb in length, frequently no more than about 50 kb in length. SEQ ID NO: 5774 is the amino acid sequence encoded by that portion of MDZ12a not found in any EST fragments. Often, the isolated nucleic acids of this embodiment are no more than about 25 kb in length, often no more than about 15 kb in length, and frequently no more than about 10 kb in length.

[0251] In another embodiment, the invention provides an isolated nucleic acid comprising (i) a nucleotide sequence that encodes SEQ ID NO: 5774 with conservative substititions, (ii) a nucleotide sequence that encodes SEQ ID NO: 5774 with moderately conservative substitutions, or (iii) the complement of (i) or (ii), wherein the isolated nucleic acid is no more than about 100 kb in length, typically no more than about 75 kb in length, and often no more than about 50 kb in length. Often, the isolated nucleic acids of this embodiment are no more than about 25 kb in length, often no more than about 15 kb in length, and frequently no more than about 10 kb in length.

[0252] In another such embodiment, the invention provides an isolated nucleic acid comprising (i) the nucleotide sequence of SEQ ID NO: 6941, (ii) a degenerate variant of SEQ ID NO: 6941, or (iii) the complement of (i) or (ii), wherein the isolated nucleic acid is no more than about 100 kb in length, typically no more than about 75 kb in length, more typically no more than about 50 kb length. SEQ ID NO: 6941 is the novel exon inserted in the MDZ12b splice variant. Often, the isolated nucleic acids of this embodiment are no more than about 25 kb in length, often no more than about 15 kb in length, and frequently no more than about 10 kb in length.

[0253] In another embodiment, the invention provides an isolated nucleic acid comprising (i) a nucleotide sequence that encodes SEQ ID NO: 6942 or (ii) the complement of a nucleotide sequence that encodes SEQ ID NO: 6942, wherein the isolated nucleic acid is no more than about 100 kb in length, typically no more than about 75 kb in length, frequently no more than about 50 kb in length. SEQ ID NO: 6942 is the amino acid sequence encoded by the novel MDZ12b exon before the stop codon. Often, the isolated nucleic acids of this embodiment are no more than about 25 kb in length, often no more than about 15 kb in length, and frequently no more than about 10 kb in length.

[0254] In another embodiment, the invention provides an isolated nucleic acid comprising (i) a nucleotide sequence that encodes SEQ ID NO: 6942 with conservative substitutions, (ii) a nucleotide sequence that encodes SEQ ID NO: 6942 with moderately conservative substititions, or (iii) the complement of (i) or (ii), wherein the isolated nucleic acid is no more than about 100 kb in length, typically no more than about 75 kb in length, and often no more than about 50 kb in length. Often, the isolated nucleic acids of this embodiment are no more than about 25 kb in length, often no more than about 15 kb in length, and frequently no more than about 10 kb in length.

[0255] Cross-Hybridizing Nucleic Acids

[0256] In another series of nucleic acid embodiments, the invention provides isolated nucleic acids that hybridize to various of the MDZ3, MDZ4, MDZ7 and MDZ12 nucleic acids of the present invention. These cross-hybridizing nucleic acids can be used, inter alia, as probes for, and to drive expression of, proteins that are related to MDZ3, MDZ4, MDZ7 and MDZ12 of the present invention as further isoforms, homologues, paralogues, or orthologues.

[0257] Cross-Hybridizing Nucleic Acids of MDZ3

[0258] In a first such embodiment, the invention provides an isolated nucleic acid comprising a sequence that hybridizes under high stringency conditions to a probe the nucleotide sequence of which consists of at least 17 nt, 18, 19, 20, 21, 22, 23, 24, 25, 30, 40, or 50 nt of SEQ ID NO: 4 or of the complement of SEQ ID NO: 4, wherein the isolated nucleic acid is no more than about 100 kb in length, typically no more than about 75 kb in length, and often no more than about 50 kb in length. Often, the isolated nucleic acids of this embodiment are no more than about 25 kb in length, often no more than about 15 kb in length, and frequently no more than about 10 kb in length.

[0259] In a further embodiment, the invention provides an isolated nucleic acid comprising a sequence that hybridizes under moderate stringency conditions to a probe the nucleotide sequence of which consists of at least 17 nt, 18, 19, 20, 21, 22, 23, 24, 25, 30, 40, or 50 nt of SEQ ID NO: 4 or of the complement of SEQ ID NO: 4, wherein the isolated nucleic acid is no more than about 100 kb in length, typically no more than about 75 kb in length, and often no more than about 50 kb in length. Often, the isolated nucleic acids of this embodiment are no more than about 25 kb in length, often no more than about 15 kb in length, and frequently no more than about 10 kb in length.

[0260] In a further embodiment, the invention provides an isolated nucleic acid comprising a sequence that hybridizes under high stringency conditions to a hybridization probe the nucleotide sequence of which (i) encodes a polypeptide having the sequence of SEQ ID NO: 7, (ii) encodes a polypeptide having the sequence of SEQ ID NO: 7 with conservative amino acid substitutions, or (iii) is the complement of (i) or (ii), wherein the isolated nucleic acid is no more than about 100 kb in length, typically no more than about 75 kb in length, and often no more than about 50 kb in length. Often, the isolated nucleic acids of this embodiment are no more than about 25 kb in length, often no more than about 15 kb in length, and frequently no more than about 10 kb in length.

[0261] Cross-Hybridizing Nucleic Acids of MDZ4

[0262] In a first such embodiment, the invention provides an isolated nucleic acid comprising a sequence that hybridizes under high stringency conditions to a probe the nucleotide sequence of which consists of at least 17 nt, 18, 19, 20, 21, 22, 23, 24, 25, 30, 40, or 50 nt of SEQ ID NO: 3030 or of the complement of SEQ ID NO: 3030, wherein the isolated nucleic acid is no more than about 100 kb in length, typically no more than about 75 kb in length, and often no more than about 50 kb in length. Often, the isolated nucleic acids of this embodiment are no more than about 25 kb in length, often no more than about 15 kb in length, and frequently no more than about 10 kb in length.

[0263] In a further embodiment, the invention provides an isolated nucleic acid comprising a sequence that hybridizes under moderate stringency conditions to a probe the nucleotide sequence of which consists of at least 17 nt, 18, 19, 20, 21, 22, 23, 24, 25, 30, 40, or 50 nt of SEQ ID NO: 3030 or of the complement of SEQ ID NO: 3030, wherein the isolated nucleic acid is no more than about 100 kb in length, typically no more than about 75 kb in length, and often no more than about 50 kb in length. Often, the isolated nucleic acids of this embodiment are no more than about 25 kb in length, often no more than about 15 kb in length, and frequently no more than about 10 kb in length.

[0264] In a further embodiment, the invention provides an isolated nucleic acid comprising a sequence that hybridizes under high stringency conditions to a hybridization probe the nucleotide sequence of which (i) encodes a polypeptide having the sequence of SEQ ID NO: 3033, (ii) encodes a polypeptide having the sequence of SEQ ID NO: 3033 with conservative amino acid substitutions, or (iii) is the complement of (i) or (ii), wherein the isolated nucleic acid is no more than about 100 kb in length, typically no more than about 75 kb in length, and often no more than about 50 kb in length. Often, the isolated nucleic acids of this embodiment are no more than about 25 kb in length, often no more than about 15 kb in length, and frequently no more than about 10 kb in length.

[0265] In yet another embodiment, the invention provides an isolated nucleic acid comprising a sequence that hybridizes under high stringency conditions to a probe the nucleotide sequence of which consists of at least 17 nt, 18, 19, 20, 21, 22, 23, 24, 25, 30, 40, or 50 nt of SEQ ID NO: 3034 or of the complement of SEQ ID NO: 3034, wherein the isolated nucleic acid is no more than about 100 kb in length, typically no more than about 75 kb in length, and often no more than about 50 kb in length. Often, the isolated nucleic acids of this embodiment are no more than about 25 kb in length, often no more than about 15 kb in length, and frequently no more than about 10 kb in length.

[0266] In a further embodiment, the invention provides an isolated nucleic acid comprising a sequence that hybridizes under moderate stringency conditions to a probe the nucleotide sequence of which consists of at least 17 nt, 18, 19, 20, 21, 22, 23, 24, 25, 30, 40, or 50 nt of SEQ ID NO: 3034 or of the complement of SEQ ID NO: 3034, wherein the isolated nucleic acid is no more than about 100 kb in length, typically no more than about 75 kb in length, and often no more than about 50 kb in length. Often, the isolated nucleic acids of this embodiment are no more than about 25 kb in length, often no more than about 15 kb in length, and frequently no more than about 10 kb in length.

[0267] In a further embodiment, the invention provides an isolated nucleic acid comprising a sequence that hybridizes under high stringency conditions to a hybridization probe the nucleotide sequence of which (i) encodes a polypeptide having the sequence of SEQ ID NO: 3037, (ii) encodes a polypeptide having the sequence of SEQ ID NO: 3037 with conservative amino acid substitutions, or (iii) is the complement of (i) or (ii), wherein the isolated nucleic acid is no more than about 100 kb in length, typically no more than about 75 kb in length, and often no more than about 50 kb in length. Often, the isolated nucleic acids of this embodiment are no more than about 25 kb in length, often no more than about 15 kb in length, and frequently no more than about 10 kb in length.

[0268] Cross-Hybridizing Nucleic Acids of MDZ7

[0269] In a first such embodiment, the invention provides an isolated nucleic acid comprising a sequence that hybridizes under high stringency conditions to a probe the nucleotide sequence of which consists of SEQ ID NO: 4410 or the complement of SEQ ID NO: 4410, wherein the isolated nucleic acid is no more than about 100 kb in length, typically no more than about 75 kb in length, and often no more than about 50 kb in length. Often, the isolated nucleic acids of this embodiment are no more than about 25 kb in length, often no more than about 15 kb in length, and frequently no more than about 10 kb in length.

[0270] In a further embodiment, the invention provides an isolated nucleic acid comprising a sequence that hybridizes under moderate stringency conditions to a probe the nucleotide sequence of which consists of SEQ ID NO: 4410 or the complement of SEQ ID NO: 4410, wherein the isolated nucleic acid is no more than about 100 kb in length, typically no more than about 75 kb in length, and often no more than about 50 kb in length. Often, the isolated nucleic acids of this embodiment are no more than about 25 kb in length, often no more than about 15 kb in length, and frequently no more than about 10 kb in length.

[0271] In a further embodiment, the invention provides an isolated nucleic acid comprising a sequence that hybridizes under high stringency conditions to a probe the nucleotide sequence of which consists of SEQ ID NO: 4411 or the complement of SEQ ID NO: 4411, wherein the isolated nucleic acid is no more than about 100 kb in length, typically no more than about 75 kb in length, and often no more than about 50 kb in length. Often, the isolated nucleic acids of this embodiment are no more than about 25 kb in length, often no more than about 15 kb in length, and frequently no more than about 10 kb in length.

[0272] In a further embodiment, the invention provides an isolated nucleic acid comprising a sequence that hybridizes under moderate stringency conditions to a probe the nucleotide sequence of which consists of SEQ ID NO: 4411 or the complement of SEQ ID NO: 4411, wherein the isolated nucleic acid is no more than about 100 kb in length, typically no more than about 75 kb in length, and often no more than about 50 kb in length. Often, the isolated nucleic acids of this embodiment are no more than about 25 kb in length, often no more than about 15 kb in length, and frequently no more than about 10 kb in length.

[0273] Cross-Hybridizing Nucleic Acids of MDZ12

[0274] In a first such embodiment, the invention provides an isolated nucleic acid comprising a sequence that hybridizes under high stringency conditions to a probe the nucleotide sequence of which consists of SEQ ID NO: 5773 or the complement of SEQ ID NO: 5773, wherein the isolated nucleic acid is no more than about 100 kb in length, typically no more than about 75 kb in length, and often no more than about 50 kb in length. Often, the isolated nucleic acids of this embodiment are no more than about 25 kb in length, often no more than about 15 kb in length, and frequently no more than about 10 kb in length.

[0275] In a further embodiment, the invention provides an isolated nucleic acid comprising a sequence that hybridizes under moderate stringency conditions to a probe the nucleotide sequence of which consists of SEQ ID NO: 5773 or the complement of SEQ ID NO: 5773, wherein the isolated nucleic acid is no more than about 100 kb in length, typically no more than about 75 kb in length, and often no more than about 50 kb in length. Often, the isolated nucleic acids of this embodiment are no more than about 25 kb in length, often no more than about 15 kb in length, and frequently no more than about 10 kb in length.

[0276] In a further embodiment, the invention provides an isolated nucleic acid comprising a sequence that hybridizes under high stringency conditions to a hybridization probe the nucleotide sequence of which (i) encodes a polypeptide having the sequence of SEQ ID NO: 5774, (ii) encodes a polypeptide having the sequence of SEQ ID NO: 5774 with conservative amino acid substitutions, or (iii) is the complement of (i) or (ii), wherein the isolated nucleic acid is no more than about 100 kb in length, typically no more than about 75 kb in length, and often no more than about 50 kb in length. Often, the isolated nucleic acids of this embodiment are no more than about 25 kb in length, often no more than about 15 kb in length, and frequently no more than about 10 kb in length.

[0277] In another such embodiment, the invention provides an isolated nucleic acid comprising a sequence that hybridizes under high stringency conditions to a probe the nucleotide sequence of which consists of SEQ ID NO: 6941 or the complement of SEQ ID NO: 6941, wherein the isolated nucleic acid is no more than about 100 kb in length, typically no more than about 75 kb in length, and often no more than about 50 kb in length. Often, the isolated nucleic acids of this embodiment are no more than about 25 kb in length, often no more than about 15 kb in length, and frequently no more than about 10 kb in length.

[0278] In a further embodiment, the invention provides an isolated nucleic acid comprising a sequence that hybridizes under moderate stringency conditions to a probe the nucleotide sequence of which consists of SEQ ID NO: 6941 or the complement of SEQ ID NO: 6941, wherein the isolated nucleic acid is no more than about 100 kb in length, typically no more than about 75 kb in length, and often no more than about 50 kb in length. Often, the isolated nucleic acids of this embodiment are no more than about 25 kb in length, often no more than about 15 kb in length, and frequently no more than about 10 kb in length.

[0279] In a further embodiment, the invention provides an isolated nucleic acid comprising a sequence that hybridizes under high stringency conditions to a hybridization probe the nucleotide sequence of which (i) encodes a polypeptide having the sequence of SEQ ID NO: 6942, (ii) encodes a polypeptide having the sequence of SEQ ID NO: 6942 with conservative amino acid substitutions, or (iii) is the complement of (i) or (ii), wherein the isolated nucleic acid is no more than about 100 kb in length, typically no more than about 75 kb in length, and often no more than about 50 kb in length. Often, the isolated nucleic acids of this embodiment are no more than about 25 kb in length, often no more than about 15 kb in length, and frequently no more than about 10 kb in length.

[0280] Particularly Useful Nucleic Acids

[0281] Particularly Useful Nucleic Acids of MDZ3

[0282] Particularly useful among the above-described MDZ3 nucleic acids are those that are expressed, or the complement of which are expressed, in brain, testis, heart and bone marrow.

[0283] Also particularly useful among the above-described MDZ3 nucleic acids are those that encode, or the complement of which encode, a polypeptide having at least one C2H2 (Kruppel family) zinc finger, and especially those that encode 7 C2H2 zinc fingers in tandem, those that encode a SCAN domain, those that encode a KRAB domain, and those that include all of a SCAN domain, KRAB domain, and 7 zinc fingers.

[0284] Also particularly useful are those encode, or the complement of which encode, a polypeptide having sequence-specific nucleic acid binding regulatory activity, and that participates in protein-protein interactions with other transcription modulators.

[0285] Particularly Useful Nucleic Acids of MDZ4

[0286] Particularly useful among the above-described MDZ4 nucleic acids are those that are expressed, or the complement of which are expressed, in bone marrow, brain, heart, hela, adult liver, fetal liver, lung, placenta and prostate.

[0287] Other particularly useful embodiments of the MDZ4 nucleic acids above-described are those that encode, or the complement of which encode, a polypeptide that has at least one C2H2 (Kruppel family) zinc finger, and especially those that encode 5 C2H2 zinc fingers in tandem, those that encode a SCAN domain, and those that include all of a SCAN domain and 5 zinc fingers.

[0288] Also particularly useful among the above-described MDZ4 nucleic acids are those that encode, or the complement of which encode, a polypeptide having sequence-specific nucleic acid binding regulatory activity, and that participates in protein-protein interactions with other transcription modulators.

[0289] Particularly Useful Nucleic Acids of MDZ7

[0290] Particularly useful among the above-described MDZ7 nucleic acids are those that are expressed, or the complement of which are expressed, in testes, preferably at a level greater than that in kidney, liver, lung, brain or heart, typically at a level at least two-fold that in kidney, liver, lung, brain or heart, often at least three-fold, four-fold, or even five-fold that in kidney, liver, lung, brain or heart.

[0291] Also particularly useful among the above-described MDZ7 nucleic acids are those that encode, or the complement of which encode, a polypeptide having at least one C2H2 (Kruppel family) zinc finger, especially those having a plurality of zinc fingers in tandem, particularly those having 7 zinc fingers in tandem.

[0292] Also particularly useful among the above-described MDZ7 nucleic acids are those that encode, or the complement of which encode, a polypeptide having sequence-specific nucleic acid binding regulatory activity, and that functions in sequence-specific modulation of gene expression.

[0293] Particularly Useful Nucleic Acids of MDZ12

[0294] Particularly useful among the above-described MDZ12 nucleic acids are those that are expressed, or the complement of which are expressed, in brain, heart, kidney, placenta, skeletal muscle, testis, Hela cells, bone marrow and liver.

[0295] Also particularly useful among the above-described nucleic acids are those that encode, or the complement of which encode, a polypeptide having a C2H2 (Kruppel family) zinc finger, particularly those having a plurality of such zinc fingers in tandem, especially those having at least 5, often at least 12, zinc fingers in tandem. Also particularly useful among the above-described nucleic acids are those that encode, or the complement of which encode, a polypeptide having KRAB-B domain, especially those having both a KRAB domain and at least one, preferably a plurality, especially at least 10, often at least 12, zinc finger domains.

[0296] Particularly useful nucleic acids are those that encode, or the complement of which encode, polypeptides that act as sequence-specific transcription regulators, and that interaction with other transcriptional modulators by protein-protein interactions.

[0297] Nucleic Acid Fragments

[0298] In another series of nucleic acid embodiments, the invention provides fragments of various of the isolated nucleic acids of the present invention which prove useful, inter alia, as nucleic acid probes, as amplification primers, and to direct expression or synthesis of epitopic or immunogenic protein fragments.

[0299] Nucleic Acid Fragments of MDZ3

[0300] In a first embodiment, the invention provides an isolated nucleic acid comprising at least 17 nucleotides, 18 nucleotides, 20 nucleotides, 24 nucleotides, or 25 nucleotides of (i) SEQ ID NO: 4, (ii) a degenerate variant of SEQ ID NO: 6, or (iii) the complement of (i) or (ii), wherein the isolated nucleic acid is no more than about 100 kb in length, typically no more than about 75 kb in length, more typically no more than about 50 kb in length. Often, the isolated nucleic acids of this embodiment are no more than about 25 kb in length, often no more than about 15 kb in length, and frequently no more than about 10 kb in length.

[0301] The invention also provides an isolated nucleic acid comprising (i) a nucleotide sequence that encodes a peptide of at least 8 contiguous amino acids of SEQ ID NO: 7, or (ii) the complement of a nucleotide sequence that encodes a peptide of at least 8 contiguous amino acids of SEQ ID NO: 7, wherein the isolated nucleic acid is no more than about 100 kb in length, typically no more than about 75 kb in length, more typically no more than about 50 kb in length. Often, the isolated nucleic acids of this embodiment are no more than about 25 kb in length, often no more than about 15 kb in length, and frequently no more than about 10 kb in length.

[0302] The invention also provides an isolated nucleic acid comprising (i) a nucleotide sequence that encodes a peptide of at least 15 contiguous amino acids of SEQ ID NO: 7, or (ii) the complement of a nucleotide sequence that encodes a peptide of at least 15 contiguous amino acids of SEQ ID NO: 7, wherein the isolated nucleic acid is no more than about 100 kb in length, typically no more than about 75 kb in length, more typically no more than about 50 kb in length. Often, the isolated nucleic acids of this embodiment are no more than about 25 kb in length, often no more than about 15 kb in length, and frequently no more than about 10 kb in length.

[0303] The invention also provides an isolated nucleic acid comprising a nucleotide sequence that encodes (i) a polypeptide having the sequence of at least 8 contiguous amino acids of SEQ ID NO: 7 with conservative amino acid substitutions, (ii) a polypeptide having the sequence of at least 15 contiguous amino acids of SEQ ID NO:7 with conservative amino acid substitutions, (iii) a polypeptide having the sequence of at least 8 contiguous amino acids of SEQ ID NO:7 with moderately conservative substitutions, (iv) a polypeptide having the sequence of at last 15 congiuous amino acids of SEQ ID NO:7 with moderately conservative substitutions, or (v) the complement of any of (i)-(iv), wherein the isolated nucleic acid is no more than about 100 kb in length, typically no more than about 75 kb in length, more typically no more than about 50 kb in length. Often, the isolated nucleic acids of this embodiment are no more than about 25 kb in length, often no more than about 15 kb in length, and frequently no more than about 10 kb in length.

[0304] Nucleic Acid Fragments of MDZ4

[0305] In a first embodiment, the invention provides an isolated nucleic acid comprising at least 17 nucleotides, 18 nucleotides, 20 nucleotides, 24 nucleotides, or 25 nucleotides of (i) SEQ ID NO: 3030, (ii) a degenerate variant of SEQ ID NO: 3032, or (iii) the complement of (i) or (ii), wherein the isolated nucleic acid is no more than about 100 kb in length, typically no more than about 75 kb in length, more typically no more than about 50 kb in length. Often, the isolated nucleic acids of this embodiment are no more than about 25 kb in length, often no more than about 15 kb in length, and frequently no more than about 10 kb in length.

[0306] The invention also provides an isolated nucleic acid comprising (i) a nucleotide sequence that encodes a peptide of at least 8 contiguous amino acids of SEQ ID NO: 3033, (ii) a nucleotide sequence that encodes a peptide of at least 15 contiguous amino acids of SEQ ID NO:3033, or (iii) the complement of (i) or (ii), wherein the isolated nucleic acid is no more than about 100 kb in length, typically no more than about 75 kb in length, more typically no more than about 50 kb in length. Often, the isolated nucleic acids of this embodiment are no more than about 25 kb in length, often no more than about 15 kb in length, and frequently no more than about 10 kb in length.

[0307] The invention also provides an isolated nucleic acid comprising a nucleotide sequence that (i) encodes a polypeptide having the sequence of at least 8 contiguous amino acids of SEQ ID NO: 3033 with conserative amino acid substitutions, (ii) encodes a polypeptide having the sequence of at least 8 contiguous amino acids of SEQ ID NO: 3033 with moderately conservative amino acid substitutions, (iii) encodes a polypeptide having the sequence of at least 15 contiguous amino acids of SEQ ID NO:3033 with conservative amino acid substitutions, (iv) encodes a polypeptide having the sequence of at last 15 contiguous amino acids of sEQ ID NO:3033 with moderately conservative amino acid substitutions, or (v) the complement of any one of (i)-(iv), wherein the isolated nucleic acid is no more than about 100 kb in length, typically no more than about 75 kb in length, more typically no more than about 50 kb in length. Often, the isolated nucleic acids of this embodiment are no more than about 25 kb in length, often no more than about 15 kb in length, and frequently no more than about 10 kb in length.

[0308] In a further embodiment, the invention provides an isolated nucleic acid comprising at least 17 nucleotides, 18 nucleotides, 20 nucleotides, 24 nucleotides, or 25 nucleotides of (i) SEQ ID NO: 3034, (ii) a degenerate variant of SEQ ID NO: 3035, or (iii) the complement of (i) or (ii), wherein the isolated nucleic acid is no more than about 100 kb in length, typically no more than about 75 kb in length, more typically no more than about 50 kb in length. Often, the isolated nucleic acids of this embodiment are no more than about 25 kb in length, often no more than about 15 kb in length, and frequently no more than about 10 kb in length.

[0309] The invention also provides an isolated nucleic acid comprising (i) a nucleotide sequence that encodes a peptide of at least 8 contiguous amino acids of SEQ ID NO: 3037, or (ii) the complement of a nucleotide sequence that encodes a peptide of at least 8 contiguous amino acids of SEQ ID NO: 3037, wherein the isolated nucleic acid is no more than about 100 kb in length, typically no more than about 75 kb in length, more typically no more than about 50 kb in length. Often, the isolated nucleic acids of this embodiment are no more than about 25 kb in length, often no more than about 15 kb in length, and frequently no more than about 10 kb in length.

[0310] The invention also provides an isolated nucleic acid comprising a nucleotide sequence that (i) encodes a polypeptide having the sequence of at least 8 contiguous amino acids of SEQ ID NO: 3037 having conservative amino acid substitutions, (ii) encodes a polypeptide having the sequence of at least 8 contiguous amino acids of SEQ ID NO: 3037 having moderately conservative amino acid substitutions, (iii) encodes a polypeptide having the sequence of at least 15 contiguous amino acids of SEQ ID NO: 3037 having conservative amino acid substitutions, (iv) encodes a polypeptide having the sequence of at least 15 contiguous amino acids of SEQ ID NO: 3037 having moderately conservative amino acid substitutions, or (v) is the complement of any of (i)-(iv), wherein the isolated nucleic acid is no more than about 100 kb in length, typically no more than about 75 kb in length, more typically no more than about 50 kb in length. Often, the isolated nucleic acids of this embodiment are no more than about 25 kb in length, often no more than about 15 kb in length, and frequently no more than about 10 kb in length.

[0311] Nucleic Acid Fragments of MDZ7

[0312] In a first embodiment of this aspect of the invention, the invention provides an isolated nucleic acid comprising at least 17 nucleotides, 18 nucleotides, 20 nucleotides, 24 nucleotides, or 25 nucleotides of (i) SEQ ID NO: 4410, or (ii) the complement thereof, wherein the isolated nucleic acid is no more than about 100 kb in length, typically no more than about 75 kb in length, more typically no more than about 50 kb in length. Often, the isolated nucleic acids of this embodiment are no more than about 25 kb in length, often no more than about 15 kb in length, and frequently no more than about 10 kb in length.

[0313] In a second embodiment, the invention provides an isolated nucleic acid comprising at least 17 nucleotides, 18 nucleotides, 20 nucleotides, 24 nucleotides, or 25 nucleotides of (i) SEQ ID NO: 4411, or (ii) the complement of thereof, wherein the isolated nucleic acid is no more than about 100 kb in length, typically no more than about 75 kb in length, more typically no more than about 50 kb in length. Often, the isolated nucleic acids of this embodiment are no more than about 25 kb in length, often no more than about 15 kb in length, and frequently no more than about 10 kb in length.

[0314] Nucleic Acid Fragments of MDZ12

[0315] In a first embodiment, the invention provides an isolated nucleic acid comprising at least 17 nucleotides, 18 nucleotides, 20 nucleotides, 24 nucleotides, or 25 nucleotides of (i) SEQ ID NO: 5773, (ii) a degenerate variant of SEQ ID NO: 5773, or (iii) the complement of (i) or (ii), wherein the isolated nucleic acid is no more than about 100 kb in length, typically no more than about 75 kb in length, more typically no more than about 50 kb in length. Often, the isolated nucleic acids of this embodiment are no more than about 25 kb in length, often no more than about 15 kb in length, and frequently no more than about 10 kb in length.

[0316] The invention also provides an isolated nucleic acid comprising (i) a nucleotide sequence that encodes a peptide of at least 8 contiguous amino acids of SEQ ID NO: 5774, or (ii) the complement of a nucleotide sequence that encodes a peptide of at least 8 contiguous amino acids of SEQ ID NO: 5774, wherein the isolated nucleic acid is no more than about 100 kb in length, typically no more than about 75 kb in length, more typically no more than about 50 kb in length. Often, the isolated nucleic acids of this embodiment are no more than about 25 kb in length, often no more than about 15 kb in length, and frequently no more than about 10 kb in length.

[0317] The invention also provides an isolated nucleic acid comprising (i) a nucleotide sequence that encodes a peptide of at least 15 contiguous amino acids of SEQ ID NO: 5774, or (ii) the complement of a nucleotide sequence that encodes a peptide of at least 15 contiguous amino acids of SEQ ID NO: 5774, wherein the isolated nucleic acid is no more than about 100 kb in length, typically no more than about 75 kb in length, more typically no more than about 50 kb in length. Often, the isolated nucleic acids of this embodiment are no more than about 25 kb in length, often no more than about 15 kb in length, and frequently no more than about 10 kb in length.

[0318] The invention also provides an isolated nucleic acid comprising a nucleotide sequence that (i) encodes a polypeptide having the sequence of at least 8 contiguous amino acids of SEQ ID NO: 5774 with conservative amino acid substitutions, or (ii) encodes a polypeptide having the sequence of at least 15 contiguous amino acids of SEQ ID NO:5774 having conservative amino acid substitutions, (iii) encodes a polypeptide having the sequence of at least 8 contiguous amino acids of SEQ ID NO:5774 with moderately conservative amino acid substitutions, (iv) encodes a polypeptide having the sequence of at least 15 contiguous amino acids of SEQ ID NO:5774 having moderately conservative amino acid substitutions, or (v) the complement of any one of (i)-(iv), wherein the isolated nucleic acid is no more than about 100 kb in length, typically no more than about 75 kb in length, more typically no more than about 50 kb in length. Often, the isolated nucleic acids of this embodiment are no more than about 25 kb in length, often no more than about 15 kb in length, and frequently no more than about 10 kb in length.

[0319] In another embodiment, the invention provides an isolated nucleic acid comprising at least 17 nucleotides, 18 nucleotides, 20 nucleotides, 24 nucleotides, or 25 nucleotides of (i) SEQ ID NO: 6941, (ii) a degenerate variant of SEQ ID NO: 6941, or (iii) the complement of (i) or (ii), wherein the isolated nucleic acid is no more than about 100 kb in length, typically no more than about 75 kb in length, more typically no more than about 50 kb in length. Often, the isolated nucleic acids of this embodiment are no more than about 25 kb in length, often no more than about 15 kb in length, and frequently no more than about 10 kb in length.

[0320] The invention also provides an isolated nucleic acid comprising (i) a nucleotide sequence that encodes a peptide of at least 8 contiguous amino acids of SEQ ID NO: 6942, or (ii) the complement of a nucleotide sequence that encodes a peptide of at least 8 contiguous amino acids of SEQ ID NO: 6942, wherein the isolated nucleic acid is no more than about 100 kb in length, typically no more than about 75 kb in length, more typically no more than about 50 kb in length. Often, the isolated nucleic acids of this embodiment are no more than about 25 kb in length, often no more than about 15 kb in length, and frequently no more than about 10 kb in length.

[0321] The invention also provides an isolated nucleic acid comprising a nucleotide sequence that (i) encodes a polypeptide having the sequence of at least 8 contiguous amino acids of SEQ ID NO: 6942 with conservative amino acid substitutions, (ii) encodes a polypeptide having the sequence of at least 15 contiguous amino acids of SEQ ID NO: 6942 with conservative amino acid substitutions, (iii) encodes a polypeptide having the sequence of at least 8 contiguous amino acids of SEQ ID NO: 6942 with moderately conservative amino acid substitutions, (iv) encodes a polypeptide having the sequence of at least 15 contiguous amino acids of SEQ ID NO: 6942 with moderately conservative amino acid substitutions, or (v) the complement of any one of (i)-(iv).

[0322] Single Exon Probes

[0323] The invention further provides genome-derived single exon probes having portions of no more than one exon of the above-described genes. As further described in commonly owned and copending U.S. patent application Ser. No. 09/632,366, filed Aug. 3, 2000 (“Methods and Apparatus for High Throughput Detection and Characterization of alternatively Spliced Genes”), the disclosure of which is incorporated herein by reference in its entirety, such single exon probes have particular utility in identifying and characterizing splice variants. In particular, such single exon probes are useful for identifying and discriminating the expression of distinct isoforms of genes.

[0324] Single Exon Probes of MDZ3

[0325] The invention further provides genome-derived single exon probes having portions of no more than one exon of the MDZ3 gene.

[0326] In a first embodiment, the invention provides an isolated nucleic acid comprising a nucleotide sequence of no more than one portion of SEQ ID NOs: 8-15 or the complement of SEQ ID NOs: 8-15, wherein the portion comprises at least 17 contiguous nucleotides, 18 contiguous nucleotides, 20 contiguous nucleotides, 24 contiguous nucleotides, 25 contiguous nucleotides, or 50 contiguous nucleotides of any one of SEQ ID Nos: 8-15, or their complement. In a further embodiment, the exonic portion comprises the entirety of the referenced SEQ ID NO: or its complement.

[0327] In other embodiments, the invention provides isolated single exon probes having the nucleotide sequence of any one of SEQ ID NOs: 16-23.

[0328] Single Exon Probes of MDZ4

[0329] The invention further provides genome-derived single exon probes having portions of no more than one exon of the MDZ4 gene.

[0330] In a first embodiment, the invention provides an isolated nucleic acid comprising a nucleotide sequence of no more than one portion of SEQ ID NOs: 3038-3041 or the complement of SEQ ID NOs: 3038-3041, wherein the portion comprises at least 17 contiguous nucleotides, 18 contiguous nucleotides, 20 contiguous nucleotides, 24 contiguous nucleotides, 25 contiguous nucleotides, or 50 contiguous nucleotides of any one of SEQ ID NOs: 3038-3041, or their complement. In a further embodiment, the exonic portion comprises the entirety of the referenced SEQ ID NO: or its complement.

[0331] In other embodiments, the invention provides isolated single exon probes having the nucleotide sequence of any one of SEQ ID NOs: 3042-3045.

[0332] Single Exon Probes of MDZ7

[0333] The invention further provides genome-derived single exon probes having portions of no more than one exon of the MDZ7 gene.

[0334] In a first embodiment, the invention provides an isolated nucleic acid comprising a nucleotide sequence of no more than one portion of SEQ ID NOs: 4412-4415 or the complement of SEQ ID NOs: 4412-4415, wherein the portion comprises at least 17 contiguous nucleotides, 18 contiguous nucleotides, 20 contiguous nucleotides, 24 contiguous nucleotides, 25 contiguous nucleotides, or 50 contiguous nucleotides of any one of SEQ ID NOs: 4412-4415, or their complement. In a further embodiment, the exonic portion comprises the entirety of the referenced SEQ ID NO: or its complement.

[0335] In other embodiments, the invention provides isolated single exon probes having the nucleotide sequence of any one of SEQ ID NOs:4416-4419.

[0336] Single Exon Probes of MDZ12

[0337] The invention further provides genome-derived single exon probes having portions of no more than one exon of the MDZ12 gene.

[0338] In a first embodiment, the invention provides an isolated nucleic acid comprising a nucleotide sequence of no more than one portion of SEQ ID NOs: 5775-5778, 6941 or the complement of SEQ ID NOs: 5775-5778, 6941 wherein the portion comprises at least 17 contiguous nucleotides, 18 contiguous nucleotides, 20 contiguous nucleotides, 24 contiguous nucleotides, 25 contiguous nucleotides, or 50 contiguous nucleotides of any one of SEQ ID NOs: 5775-5778, 6941, or their complement. In a further embodiment, the exonic portion comprises the entirety of the referenced SEQ ID NO: or its complement.

[0339] In other embodiments, the invention provides isolated single exon probes having the nucleotide sequence of any one of SEQ ID NOs: 5779-5782 and 6941.

[0340] Transcription Control Nucleic Acids

[0341] Transcription Control Nucleic Acids of MDZ3

[0342] In another aspect, the present invention provides genome-derived isolated nucleic acids that include nucleic acid sequence elements that control transcription of the MDZ3 gene. These nucleic acids can be used, inter alia, to drive expression of heterologous coding regions in recombinant constructs, thus conferring upon such heterologous coding regions the expression pattern of the native MDZ3 gene. These nucleic acids can also be used, conversely, to target heterologous transcription control elements to the MDZ3 genomic locus, altering the expression pattern of the MDZ3 gene itself.

[0343] In a first such embodiment, the invention provides an isolated nucleic acid comprising the nucleotide sequence of SEQ ID NO: 24 or its complement, wherein the isolated nucleic acid is no more than about 100 kb in length, typically no more than about 75 kb in length, more typically no more than about 50 kb in length. Often, the isolated nucleic acids of this embodiment are no more than about 25 kb in length, often no more than about 15 kb in length, and frequently no more than about 10 kb in length.

[0344] In another embodiment, the invention provides an isolated nucleic acid comprising at least 17, 18, 20, 24, or 25 nucleotides of the sequence of SEQ ID NO: 24 or its complement, wherein the isolated nucleic acid is no more than about 100 kb in length, typically no more than about 75 kb in length, more typically no more than about 50 kb in length. Often, the isolated nucleic acids of this embodiment are no more than about 25 kb in length, often no more than about 15 kb in length, and frequently no more than about 10 kb in length.

[0345] Transcription Control Nucleic Acids of MDZ4

[0346] In another aspect, the present invention provides genome-derived isolated nucleic acids that include nucleic acid sequence elements that control transcription of the MDZ4 gene. These nucleic acids can be used, inter alia, to drive expression of heterologous coding regions in recombinant constructs, thus conferring upon such heterologous coding regions the expression pattern of the native MDZ4 gene. These nucleic acids can also be used, conversely, to target heterologous transcription control elements to the MDZ4 genomic locus, altering the expression pattern of the MDZ4 gene itself.

[0347] In a first such embodiment, the invention provides an isolated nucleic acid comprising the nucleotide sequence of SEQ ID NO: 3046 or its complement, wherein the isolated nucleic acid is no more than about 100 kb in length, typically no more than about 75 kb in length, more typically no more than about 50 kb in length. Often, the isolated nucleic acids of this embodiment are no more than about 25 kb in length, often no more than about 15 kb in length, and frequently no more than about 10 kb in length.

[0348] In another embodiment, the invention provides an isolated nucleic acid comprising at least 17, 18, 20, 24, or 25 nucleotides of the sequence of SEQ ID NO: 3046 or its complement, wherein the isolated nucleic acid is no more than about 100 kb in length, typically no more than about 75 kb in length, more typically no more than about 50 kb in length. Often, the isolated nucleic acids of this embodiment are no more than about 25 kb in length, often no more than about 15 kb in length, and frequently no more than about 10 kb in length.

[0349] Transcription Control Nucleic Acids of MDZ7

[0350] In another aspect, the present invention provides genome-derived isolated nucleic acids that include nucleic acid sequence elements that control transcription of the MDZ7 gene. These nucleic acids can be used, inter alia, to drive expression of heterologous coding regions in recombinant constructs, thus conferring upon such heterologous coding regions the expression pattern of the native MDZ7 gene. These nucleic acids can also be used, conversely, to target heterologous transcription control elements to the MDZ7 genomic locus, altering the expression pattern of the MDZ7 gene itself.

[0351] In a first such embodiment, the invention provides an isolated nucleic acid comprising the nucleotide sequence of SEQ ID NO: 4420 or its complement, wherein the isolated nucleic acid is no more than about 100 kb in length, typically no more than about 75 kb in length, more typically no more than about 50 kb in length. Often, the isolated nucleic acids of this embodiment are no more than about 25 kb in length, often no more than about 15 kb in length, and frequently no more than about 10 kb in length.

[0352] In another embodiment, the invention provides an isolated nucleic acid comprising at least 17, 18, 20, 24, or 25 nucleotides of the sequence of SEQ ID NO: 4420 or its complement, wherein the isolated nucleic acid is no more than about 100 kb in length, typically no more than about 75 kb in length, more typically no more than about 50 kb in length. Often, the isolated nucleic acids of this embodiment are no more than about 25 kb in length, often no more than about 15 kb in length, and frequently no more than about 10 kb in length.

[0353] Transcription Control Nucleic Acids of MDZ12

[0354] In another aspect, the present invention provides genome-derived isolated nucleic acids that include nucleic acid sequence elements that control transcription of the MDZ12 gene. These nucleic acids can be used, inter alia, to drive expression of heterologous coding regions in recombinant constructs, thus conferring upon such heterologous coding regions the expression pattern of the native MDZ12 gene. These nucleic acids can also be used, conversely, to target heterologous transcription control elements to the MDZ12 genomic locus, altering the expression pattern of the MDZ12 gene itself.

[0355] In a first such embodiment, the invention provides an isolated nucleic acid comprising the nucleotide sequence of SEQ ID NO: 5783 or its complement, wherein the isolated nucleic acid is no more than about 100 kb in length, typically no more than about 75 kb in length, more typically no more than about 50 kb in length. Often, the isolated nucleic acids of this embodiment are no more than about 25 kb in length, often no more than about 15 kb in length, and frequently no more than about 10 kb in length.

[0356] In another embodiment, the invention provides an isolated nucleic acid comprising at least 17, 18, 20, 24, or 25 nucleotides of the sequence of SEQ ID NO: 5783 or its complement, wherein the isolated nucleic acid is no more than about 100 kb in length, typically no more than about 75 kb in length, more typically no more than about 50 kb in length. Often, the isolated nucleic acids of this embodiment are no more than about 25 kb in length, often no more than about 15 kb in length, and frequently no more than about 10 kb in length.

[0357] Vectors and Host Cells

[0358] In another aspect, the present invention provides vectors that comprise one or more of the isolated nucleic acids of the present invention, and host cells in which such vectors have been introduced.

[0359] The vectors can be used, inter alia, for propagating the nucleic acids of the present invention in host cells (cloning vectors), for shuttling the nucleic acids of the present invention between host cells derived from disparate organisms (shuttle vectors), for inserting the nucleic acids of the present invention into host cell chromosomes (insertion vectors), for expressing sense or antisense RNA transcripts of the nucleic acids of the present invention in vitro or within a host cell, and for expressing polypeptides encoded by the nucleic acids of the present invention, alone or as fusions to heterologous polypeptides. Vectors of the present invention will often be suitable for several such uses.

[0360] Vectors are by now well-known in the art, and are described, inter alia, in Jones et al. (eds.), Vectors: Cloning Applications: Essential Techniques (Essential Techniques Series), John Wiley & Son Ltd 1998 (ISBN: 047196266X); Jones et al. (eds.), Vectors: Expression Systems: Essential Techniques (Essential Techniques Series), John Wiley & Son Ltd, 1998 (ISBN:0471962678); Gacesa et al., Vectors: Essential Data, John Wiley & Sons, 1995 (ISBN: 0471948411); Cid-Arregui (eds.), Viral Vectors: Basic Science and Gene Therapy, Eaton Publishing Co., 2000 (ISBN: 188129935X); Sambrook et al., Molecular Cloning: A Laboratory Manual (3^{rd} ed.), Cold Spring Harbor Laboratory Press, 2001 (ISBN: 0879695773); Ausubel et al. (eds.), Short Protocols in Molecular Biology: A Compendium of Methods from Current Protocols in Molecular Biology (4^{th} ed.), John Wiley & Sons, 1999 (ISBN: 047132938X), the disclosures of which are incorporated herein by reference in their entireties. Furthermore, an enormous variety of vectors are available commercially. Use of existing vectors and modifications thereof being well within the skill in the art, only basic features need be described here.

[0361] Typically, vectors are derived from virus, plasmid, prokaryotic or eukaryotic chromosomal elements, or some combination thereof, and include at least one origin of replication, at least one site for insertion of heterologous nucleic acid, typically in the form of a polylinker with multiple, tightly clustered, single cutting restriction sites, and at least one selectable marker, although some integrative vectors will lack an origin that is functional in the host to be chromosomally modified, and some vectors will lack selectable markers. Vectors of the present invention will further include at least one nucleic acid of the present invention inserted into the vector in at least one location.

[0362] Where present, the origin of replication and selectable markers are chosen based upon the desired host cell or host cells; the host cells, in turn, are selected based upon the desired application.

[0363] For example, prokaryotic cells, typically E. coli, are typically chosen for cloning. In such case, vector replication is predicated on the replication strategies of coliform-infecting phage—such as phage lambda, M13, T7, T3 and P1—or on the replication origin of autonomously replicating episomes, notably the ColE1 plasmid and later derivatives, including pBR322 and the pUC series plasmids. Where E. coli is used as host, selectable markers are, analogously, chosen for selectivity in gram negative bacteria: e.g., typical markers confer resistance to antibiotics, such as ampicillin, tetracycline, chloramphenicol, kanamycin, streptomycin, zeocin; auxotrophic markers can also be used.

[0364] As another example, yeast cells, typically S. cerevisiae, are chosen, inter alia, for eukaryotic genetic studies, due to the ease of targeting genetic changes by homologous recombination and to the ready ability to complement genetic defects using recombinantly expressed proteins, for identification of interacting protein components, e.g. through use of a two-hybrid system, and for protein expression. Vectors of the present invention for use in yeast will typically, but not invariably, contain an origin of replication suitable for use in yeast and a selectable marker that is functional in yeast.

[0365] Integrative YIp vectors do not replicate autonomously, but integrate, typically in single copy, into the yeast genome at low frequencies and thus replicate as part of the host cell chromosome; these vectors lack an origin of replication that is functional in yeast, although they typically have at least one origin of replication suitable for propagation of the vector in bacterial cells. YEp vectors, in contrast, replicate episomally and autonomously due to presence of the yeast 2 micron plasmid origin (2 μm ori). The YCp yeast centromere plasmid vectors are autonomously replicating vectors containing centromere sequences, CEN, and autonomously replicating sequences, ARS; the ARS sequences are believed to correspond to the natural replication origins of yeast chromosomes. YACs are based on yeast linear plasmids, denoted YLp, containing homologous or heterologous DNA sequences that function as telomeres (TEL) in vivo, as well as containing yeast ARS (origins of replication) and CEN (centromeres) segments.

[0366] Selectable markers in yeast vectors include a variety of auxotrophic markers, the most common of which are (in Saccharomyces cerevisiae) URA3, HIS3, LEU2, TRP1 and LYS2, which complement specific auxotrophic mutations, such as ura3-52, his3-D1, leu2-D1, trp1-D1 and lys2-201. The URA3 and LYS2 yeast genes further permit negative selection based on specific inhibitors, 5-fluoro-orotic acid (FOA) and α-aminoadipic acid (αAA), respectively, that prevent growth of the prototrophic strains but allows growth of the ura3 and lys2 mutants, respectively. Other selectable markers confer resistance to, e.g., zeocin.

[0367] As yet another example, insect cells are often chosen for high efficiency protein expression. Where the host cells are from Spodoptera frugiperda—e.g., Sf9 and Sf21 cell lines, and expresSF™ cells (Protein Sciences Corp., Meriden, Conn., USA)—the vector replicative strategy is typically based upon the baculovirus life cycle. Typically, baculovirus transfer vectors are used to replace the wild-type AcMNPV polyhedrin gene with a heterologous gene of interest. Sequences that flank the polyhedrin gene in the wild-type genome are positioned 5′ and 3′ of the expression cassette on the transfer vectors. Following cotransfection with AcMNPV DNA, a homologous recombination event occurs between these sequences resulting in a recombinant virus carrying the gene of interest and the polyhedrin or p10 promoter. Selection can be based upon visual screening for lacZ fusion activity.

[0368] As yet another example, mammalian cells are often chosen for expression of proteins intended as pharmaceutical agents, and are also chosen as host cells for screening of potential agonist and antagonists of a protein or a physiological pathway.

[0369] Where mammalian cells are chosen as host cells, vectors intended for autonomous extrachromosomal replication will typically include a viral origin, such as the SV40 origin (for replication in cell lines expressing the large T-antigen, such as COS1 and COS7 cells), the papillomavirus origin, or the EBV origin for long term episomal replication (for use, e.g., in 293-EBNA cells, which constitutively express the EBV EBNA-1 gene product and adenovirus E1A). Vectors intended for integration, and thus replication as part of the mammalian chromosome, can, but need not, include an origin of replication functional in mammalian cells, such as the SV40 origin. Vectors based upon viruses, such as adenovirus, adeno-associated virus, vaccinia virus, and various mammalian retroviruses, will typically replicate according to the viral replicative strategy.

[0370] Selectable markers for use in mammalian cells include resistance to neomycin (G418), blasticidin, hygromycin and to zeocin, and selection based upon the purine salvage pathway using HAT medium.

[0371] Plant cells can also be used for expression, with the vector replicon typically derived from a plant virus (e.g., cauliflower mosaic virus, CaMV; tobacco mosaic virus, TMV) and selectable markers chosen for suitability in plants.

[0372] For propagation of nucleic acids of the present invention that are larger than can readily be accomodated in vectors derived from plasmids or virus, the invention further provides artificial chromosomes—BACs, YACs, HACs and PACs—that comprise MDZ3, MDZ4, MDZ7 and MDZ12 nucleic acids, respectively, often genomic nucleic acids.

[0373] The BAC system is based on the well-characterized E. coli F-factor, a low copy plasmid that exists in a supercoiled circular form in host cells. The structural features of the F-factor allow stable maintenance of individual human DNA clones as well as easy manipulation of the cloned DNA. See Shizuya et al., Kelo J. Med. 50(1):26-30 (2001); Shizuya et al., Proc. Natl. Acad. Sci. USA 89(18):8794-7 (1992).

[0374] YACs are based on yeast linear plasmids, denoted YLp, containing homologous or heterologous DNA sequences that function as telomeres (TEL) in vivo, as well as containing yeast ARS (origins of replication) and CEN (centromeres) segments.

[0375] HACs are human artifical chromosomes. Kuroiwa et al., Nature Biotechnol. 18(10):1086-90 (2000); Henning et al., Proc. Natl. Acad. Sci. USA 96(2):592-7 (1999); Harrington et al., Nature Genet. 15(4):345-55 (1997). In one version, long synthetic arrays of alpha satellite DNA are combined with telomeric DNA and genomic DNA to generate linear microchromosomes that are mitotically and cytogenetically stable in the absence of selection.

[0376] PACs are P1-derived artificial chromosomes. Sternberg, Proc. Natl. Acad. Sci. USA 87(1):103-7 (1990); Sternberg et al., New Biol. 2(2):151-62 (1990); Pierce et al., Proc. Natl Acad. Sci. USA 89(6):2056-60 (1992).

[0377] Vectors of the present invention will also often include elements that permit in vitro transcription of RNA from the inserted heterologous nucleic acid. Such vectors typically include a phage promoter, such as that from T7, T3, or SP6, flanking the nucleic acid insert. Often two different such promoters flank the inserted nucleic acid, permitting separate in vitro production of both sense and antisense strands.

[0378] Expression vectors of the present invention—that is, those vectors that will drive expression of polypeptides from the inserted heterologous nucleic acid—will often include a variety of other genetic elements operatively linked to the protein-encoding heterologous nucleic acid insert, typically genetic elements that drive transcription, such as promoters and enhancer elements, those that facilitate RNA processing, such as transcription termination and/or polyadenylation signals, and those that facilitate translation, such as ribosomal consensus sequences.

[0379] For example, vectors for expressing proteins of the present invention in prokaryotic cells, typically E. coli, will include a promoter, often a phage promoter, such as phage lambda pL promoter, the trc promoter, a hybrid derived from the trp and lac promoters, the bacteriophage T7 promoter (in E. coli cells engineered to express the T7 polymerase), or the araBAD operon. Often, such prokaryotic expression vectors will further include transcription terminators, such as the aspA terminator, and elements that facilitate translation, such as a consensus ribosome binding site and translation termination codon, Schomer et al., Proc. Natl. Acad. Sci. USA 83:8506-8510 (1986).

[0380] As another example, vectors for expressing proteins of the present invention in yeast cells, typically S. cerevisiae, will include a yeast promoter, such as the CYC1 promoter, the GAL1 promoter, ADH1 promoter, or the GPD promoter, and will typically have elements that facilitate transcription termination, such as the transcription termination signals from the CYC1 or ADH1 gene.

[0381] As another example, vectors for expressing proteins of the present invention in mammalian cells will include a promoter active in mammalian cells. Such promoters are often drawn from mammalian viruses—such as the enhancer-promoter sequences from the immediate early gene of the human cytomegalovirus (CMV), the enhancer-promoter sequences from the Rous sarcoma virus long terminal repeat (RSV LTR), and the enhancer-promoter from SV40. Often, expression is enhanced by incorporation of polyadenylation sites, such as the late SV40 polyadenylation site and the polyadenylation signal and transcription termination sequences from the bovine growth hormone (BGH) gene, and ribosome binding sites. Furthermore, vectors can include introns, such as intron II of rabbit β-globin gene and the SV40 splice elements.

[0382] Vector-drive protein expression can be constitutive or inducible.

[0383] Inducible vectors include either naturally inducible promoters, such as the trc promoter, which is regulated by the lac operon, and the pL promoter, which is regulated by tryptophan, the MMTV-LTR promoter, which is inducible by dexamethasone, or can contain synthetic promoters and/or additional elements that confer inducible control on adjacent promoters. Examples of inducible synthetic promoters are the hybrid Plac/ara-1 promoter and the PLtetO-1 promoter. The PltetO-1 promoter takes advantage of the high expression levels from the PL promoter of phage lambda, but replaces the lambda repressor sites with two copies of operator 2 of the Tn10 tetracycline resistance operon, causing this promoter to be tightly repressed by the Tet repressor protein and induced in response to tetracycline (Tc) and Tc derivatives such as anhydrotetracycline.

[0384] As another example of inducible elements, hormone response elements, such as the glucocorticoid response element (GRE) and the estrogen response element (ERE), can confer hormone inducibility where vectors are used for expression in cells having the respective hormone receptors. To reduce background levels of expression, elements responsive to ecdysone, an insect hormone, can be used instead, with coexpression of the ecdysone receptor.

[0385] Expression vectors can be designed to fuse the expressed polypeptide to small protein tags that facilitate purification and/or visualization.

[0386] For example, proteins of the present invention can be expressed with a polyhistidine tag that facilitates purification of the fusion protein by immobilized metal affinity chromatography, for example using NiNTA resin (Qiagen Inc., Valencia, Calif., USA) or TALON™ resin (cobalt immobilized affinity chromatography medium, Clontech Labs, Palo Alto, Calif., USA). As another example, the fusion protein can include a chitin-binding tag and self-excising intein, permitting chitin-based purification with self-removal of the fused tag (IMPACT™ system, New England Biolabs, Inc., Beverley, Mass., USA). Alternatively, the fusion protein can include a calmodulin-binding peptide tag, permitting purification by calmodulin affinity resin (Stratagene, La Jolla, Calif., USA), or a specifically excisable fragment of the biotin carboxylase carrier protein, permitting purification of in vivo biotinylated protein using an avidin resin and subsequent tag removal (Promega, Madison, Wis., USA). As another useful alternative, the proteins of the present invention can be expressed as a fusion to glutathione-S-transferase, the affinity and specificity of binding to glutathione permitting purification using glutathione affinity resins, such as Glutathione-Superfiow Resin (Clontech Laboratories, Palo Alto, Calif., USA), with subsequent elution with free glutathione.

[0387] Other tags include, for example, the Xpress epitope, detectable by anti-Xpress antibody (Invitrogen, Carlsbad, Calif., USA), a myc tag, detectable by anti-myc tag antibody, the VS epitope, detectable by anti-V5 antibody (Invitrogen, Carlsbad, Calif., USA), FLAG® epitope, detectable by anti-FLAG® antibody (Stratagene, La Jolla, Calif., USA), and the HA epitope.

[0388] For secretion of expressed proteins, vectors can include appropriate sequences that encode secretion signals, such as leader peptides. For example, the pSecTag2 vectors (Invitrogen, Carlsbad, Calif., USA) are 5.2 kb mammalian expression vectors that carry the secretion signal from the V-J2-C region of the mouse Ig kappa-chain for efficient secretion of recombinant proteins from a variety of mammalian cell lines.

[0389] Expression vectors can also be designed to fuse proteins encoded by the heterologous nucleic acid insert to polypeptides larger than purification and/or identification tags. Useful protein fusions include those that permit display of the encoded protein on the surface of a phage or cell, fusions to intrinsically fluorescent proteins, such as those that have a green fluorescent protein (GFP)-like chromophore, fusions to the IgG Fc region, and fusions for use in two hybrid systems.

[0390] Vectors for phage display fuse the encoded polypeptide to, e.g., the gene III protein (pIII) or gene VIII protein (pVIII) for display on the surface of filamentous phage, such as M13. See Barbas et al., Phage Display: A Laboratory Manual, Cold Spring Harbor Laboratory Press (2001) (ISBN 0-87969-546-3); Kay et al. (eds.), Phage Display of Peptides and Proteins: A Laboratory Manual, San Diego: Academic Press, Inc., 1996; Abelson et al. (eds.), Combinatorial Chemistry, Methods in Enzymology vol. 267, Academic Press (May 1996).

[0391] Vectors for yeast display, e.g. the pYD1 yeast display vector (Invitrogen, Carlsbad, Calif., USA), use the α-agglutinin yeast adhesion receptor to display recombinant protein on the surface of S. cerevisiae. Vectors for mammalian display, e.g., the pDisplay™ vector (Invitrogen, Carlsbad, Calif., USA), target recombinant proteins using an N-terminal cell surface targeting signal and a C-terminal transmembrane anchoring domain of platelet derived growth factor receptor.

[0392] A wide variety of vectors now exist that fuse proteins encoded by heterologous nucleic acids to the chromophore of the substrate-independent, intrinsically fluorescent green fluorescent protein from Aequorea Victoria (“GFP”) and its variants. These proteins are intrinsically fluorescent: the GFP-like chromophore is entirely encoded by its amino acid sequence and can fluoresce without requirement for cofactor or substrate.

[0393] Structurally, the GFP-like chromophore comprises an 11-stranded β-barrel (β-can) with a central α-helix, the central α-helix having a conjugated π-resonance system that includes two aromatic ring systems and the bridge between them. The π-resonance system is created by autocatalytic cyclization among amino acids; cyclization proceeds through an imidazolinone intermediate, with subsequent dehydrogenation by molecular oxygen at the Cα-Cβ bond of a participating tyrosine.

[0394] The GFP-like chromophore can be selected from GFP-like chromophores found in naturally occurring proteins, such as A. victoria GFP (GenBank accession number AAA27721), Renilla reniformis GFP, FP583 (GenBank accession no. AF168419) (DsRed), FP593 (AF272711), FP483 (AF168420), FP484 (AF168424), FP595 (AF246709), FP486 (AF168421), FP538 (AF168423), and FP506 (AF168422), and need include only so much of the native protein as is needed to retain the chromophore's intrinsic fluorescence. Methods for determining the minimal domain required for fluorescence are known in the art. Li et al.,“Deletions of the Aequorea victoria Green Fluorescent Protein Define the Minimal Domain Required for Fluorescence,” J. Biol. Chem. 272:28545-28549 (1997).

[0395] Alternatively, the GFP-like chromophore can be selected from GFP-like chromophores modified from those found in nature. Typically, such modifications are made to improve recombinant production in heterologous expression systems (with or without change in protein sequence), to alter the excitation and/or emission spectra of the native protein, to facilitate purification, to facilitate or as a consequence of cloning, or are a fortuitous consequence of research investigation.

[0396] The methods for engineering such modified GFP-like chromophores and testing them for fluorescence activity, both alone and as part of protein fusions, are well-known in the art. Early results of these efforts are reviewed in Heim et al., Curr. Biol. 6:178-182 (1996), incorporated herein by reference in its entirety; a more recent review, with tabulation of useful mutations, is found in Palm et al., “Spectral Variants of Green Fluorescent Protein,” in Green Fluorescent Proteins, Conn (ed.), Methods Enzymol. vol. 302, pp. 378-394 (1999), incorporated herein by reference in its entirety. A variety of such modified chromophores are now commercially available and can readily be used in the fusion proteins of the present invention.

[0397] For example, EGFP (“enhanced GFP”), Cormack et al., Gene 173:33-38 (1996); U.S. Pat. Nos. 6,090,919 and 5,804,387, is a red-shifted, human codon-optimized variant of GFP that has been engineered for brighter fluorescence, higher expression in mammalian cells, and for an excitation spectrum optimized for use in flow cytometers. EGFP can usefully contribute a GFP-like chromophore to the fusion proteins of the present invention. A variety of EGFP vectors, both plasmid and viral, are available commercially (Clontech Labs, Palo Alto, Calif., USA), including vectors for bacterial expression, vectors for N-terminal protein fusion expression, vectors for expression of C-terminal protein fusions, and for bicistronic expression.

[0398] Toward the other end of the emission spectrum, EBFP (“enhanced blue fluorescent protein”) and BFP2 contain four amino acid substitutions that shift the emission from green to blue, enhance the brightness of fluorescence and improve solubility of the protein, Heim et al., Curr. Biol. 6:178-182 (1996); Cormack et al., Gene 173:33-38 (1996). EBFP is optimized for expression in mammalian cells whereas BFP2, which retains the original jellyfish codons, can be expressed in bacteria; as is further discussed below, the host cell of production does not affect the utility of the resulting fusion protein. The GFP-like chromophores from EBFP and BFP2 can usefully be included in the fusion proteins of the present invention, and vectors containing these blue-shifted variants are available from Clontech Labs (Palo Alto, Calif., USA).

[0399] Analogously, EYFP (“enhanced yellow fluorescent protein”), also available from Clontech Labs, contains four amino acid substitutions, different from EBFP, Ormö et al., Science 273:1392-1395 (1996), that shift the emission from green to yellowish-green. Citrine, an improved yellow fluorescent protein mutant, is described in Heikal et al., Proc. Natl. Acad. Sci. USA 97:11996-12001 (2000). ECFP (“enhanced cyan fluorescent protein”) (Clontech Labs, Palo Alto, Calif., USA) contains six amino acid substitutions, one of which shifts the emission spectrum from green to cyan. Heim et al., Curr. Biol. 6:178-182 (1996); Miyawaki et al., Nature 388:882-887 (1997). The GFP-like chromophore of each of these GFP variants can usefully be included in the fusion proteins of the present invention.

[0400] The GFP-like chromophore can also be drawn from other modified GFPs, including those described in U.S. Pat. Nos. 6,124,128; 6,096,865; 6,090,919; 6,066,476; 6,054,321; 6,027,881; 5,968,750; 5,874,304; 5,804,387; 5,777,079; 5,741,668; and 5,625,048, the disclosures of which are incorporated herein by reference in their entireties. See also Conn (ed.), Green Fluorescent Protein, Methods in Enzymol. Vol. 302, pp 378-394 (1999), incorporated herein by reference in its entirety. A variety of such modified chromophores are now commercially available and can readily be used in the fusion proteins of the present invention.

[0401] Fusions to the IgG Fc region increase serum half life of protein pharmaceutical products through interaction with the FcRn receptor (also denominated the FcRp receptor and the Brambell receptor, FcRb), further described in international patent application nos. WO 97/43316, WO 97/34631, WO 96/32478, WO 96/18412.

[0402] For long-term, high-yield recombinant production of the proteins, protein fusions, and protein fragments of the present invention, stable expression is particularly useful.

[0403] Stable expression is readily achieved by integration into the host cell genome of vectors having selectable markers, followed by selection for integrants.

[0404] For example, the pUB6/V5-His A, B, and C vectors (Invitrogen, Carlsbad, Calif., USA) are designed for high-level stable expression of heterologous proteins in a wide range of mammalian tissue types and cell lines. pUB6/V5-His uses the promoter/enhancer sequence from the human ubiquitin C gene to drive expression of recombinant proteins: expression levels in 293, CHO, and NIH3T3 cells are comparable to levels from the CMV and human EF-1a promoters. The bsd gene permits rapid selection of stably transfected mammalian cells with the potent antibiotic blasticidin.

[0405] Replication incompetent retroviral vectors, typically derived from Moloney murine leukemia virus, prove particularly useful for creating stable transfectants having integrated provirus. The highly efficient transduction machinery of retroviruses, coupled with the availability of a variety of packaging cell lines—such as RetroPack™ PT 67, EcoPack2™-293, AmphoPack-293, GP2-293 cell lines (all available from Clontech Laboratories, Palo Alto, Calif., USA)—allow a wide host range to be infected with high efficiency; varying the multiplicity of infection readily adjusts the copy number of the integrated provirus. Retroviral vectors are available with a variety of selectable markers, such as resistance to neomycin, hygromycin, and puromycin, permitting ready selection of stable integrants.

[0406] The present invention further includes host cells comprising the vectors of the present invention, either present episomally within the cell or integrated, in whole or in part, into the host cell chromosome.

[0407] Among other considerations, some of which are described above, a host cell strain may be chosen for its ability to process the expressed protein in the desired fashion. Such post-translational modifications of the polypeptide include, but are not limited to, acetylation, carboxylation, glycosylation, phosphorylation, lipidation, and acylation, and it is an aspect of the present invention to provide MDZ3, MDZ4, MDZ7 and MDZ12 proteins, respectively, with such post-translational modifications.

[0408] As noted earlier, host cells can be prokaryotic or eukaryotic. Representative examples of appropriate host cells include, but are not limited to, bacterial cells, such as E. coli, Caulobacter crescentus, Streptomyces species, and Salmonella typhimurium; yeast cells, such as Saccharomyces cerevisiae, Schizosaccharomyces pombe, Pichia pastoris, Pichia methanolica; insect cell lines, such as those from Spodoptera frugiperda—e.g., Sf9 and Sf21 cell lines, and expresSF™ cells (Protein Sciences Corp., Meriden, Conn., USA)—Drosophila S2 cells, and Trichoplusia ni High Five® Cells (Invitrogen, Carlsbad, Calif., USA); and mammalian cells. Typical mammalian cells include COS1 and COS7 cells, chinese hamster ovary (CHO) cells, NIH 3T3 cells, 293 cells, HEPG2 cells, HeLa cells, L cells, murine ES cell lines (e.g., from strains 129/SV, C57/BL6, DBA-1, 129/SVJ), K562, Jurkat cells, and BW5147. Other mammalian cell lines are well known and readily available from the American Type Culture Collection (ATCC) (Manassas, Va., USA) and the National Institute of General medical Sciences (NIGMS) Human Genetic Cell Repository at the Coriell Cell Repositories (Camden, N.J., USA).

[0409] Methods for introducing the vectors and nucleic acids of the present invention into the host cells are well known in the art; the choice of technique will depend primarily upon the specific vector to be introduced and the host cell chosen.

[0410] For example, phage lambda vectors will typically be packaged using a packaging extract (e.g., Gigapack® packaging extract, Stratagene, La Jolla, Calif., USA), and the packaged virus used to infect E. coli. Plasmid vectors will typically be introduced into chemically competent or electrocompetent bacterial cells.

[0411] E. coli cells can be rendered chemically competent by treatment, e.g., with CaCl₂, or a solution of Mg²⁺, Mn²⁺, Ca²⁺, Rb⁺ or K⁺, dimethyl sulfoxide, dithiothreitol, and hexamine cobalt (III), Hanahan, J. Mol. Biol. 166(4):557-80 (1983), and vectors introduced by heat shock. A wide variety of chemically competent strains are also available commercially (e.g., Epicurian Coli® XL10-Gold® Ultracompetent Cells (Stratagene, La Jolla, Calif., USA); DH5α competent cells (Clontech Laboratories, Palo Alto, Calif., USA); TOP10 Chemically Competent E. coli Kit (Invitrogen, Carlsbad, Calif., USA)).

[0412] Bacterial cells can be rendered electrocompetent—that is, competent to take up exogenous DNA by electroporation—by various pre-pulse treatments; vectors are introduced by electroporation followed by subsequent outgrowth in selected media. An extensive series of protocols is provided online in Electroprotocols (BioRad, Richmond, Calif., USA) (http://www.bio-rad.com/LifeScience/pdf/New_Gene_Pulser.pdf).

[0413] Vectors can be introduced into yeast cells by spheroplasting, treatment with lithium salts, electroporation, or protoplast fusion.

[0414] Spheroplasts are prepared by the action of hydrolytic enzymes—a snail-gut extract, usually denoted Glusulase, or Zymolyase, an enzyme from Arthrobacter luteus—to remove portions of the cell wall in the presence of osmotic stabilizers, typically 1 M sorbitol. DNA is added to the spheroplasts, and the mixture is co-precipitated with a solution of polyethylene glycol (PEG) and Ca²⁺. Subsequently, the cells are resuspended in a solution of sorbitol, mixed with molten agar and then layered on the surface of a selective plate containing sorbitol. For lithium-mediated transformation, yeast cells are treated with lithium acetate, which apparently permeabilizes the cell wall, DNA is added and the cells are co-precipitated with PEG. The cells are exposed to a brief heat shock, washed free of PEG and lithium acetate, and subsequently spread on plates containing ordinary selective medium. Increased frequencies of transformation are obtained by using specially-prepared single-stranded carrier DNA and certain organic solvents. Schiestl et al., Curr. Genet. 16(5-6):339-46 (1989). For electroporation, freshly-grown yeast cultures are typically washed, suspended in an osmotic protectant, such as sorbitol, mixed with DNA, and the cell suspension pulsed in an electroporation device. Subsequently, the cells are spread on the surface of plates containing selective media. Becker et al., Methods Enzymol. 194:182-7 (1991). The efficiency of transformation by electroporation can be increased over 100-fold by using PEG, single-stranded carrier DNA and cells that are in late log-phase of growth. Larger constructs, such as YACs, can be introduced by protoplast fusion.

[0415] Mammalian and insect cells can be directly infected by packaged viral vectors, or transfected by chemical or electrical means.

[0416] For chemical transfection, DNA can be coprecipitated with CaPO₄ or introduced using liposomal and nonliposomal lipid-based agents. Commercial kits are available for CaPO₄ transfection (CalPhos™ Mammalian Transfection Kit, Clontech Laboratories, Palo Alto, Calif., USA), and lipid-mediated transfection can be practiced using commercial reagents, such as LIPOFECTAMINE™ 2000, LIPOFECTAMINE™ Reagent, CELLFECTIN® Reagent, and LIPOFECTIN® Reagent (Invitrogen, Carlsbad, Calif., USA), DOTAP Liposomal Transfection Reagent, FuGENE 6, X-tremeGENE Q2, DOSPER, (Roche Molecular Biochemicals, Indianapolis, Ind. USA), Effectene™, PolyFect®, Superfect® (Qiagen, Inc., Valencia, Calif., USA). Protocols for electroporating mammalian cells can be found online in Electroprotocols (Bio-Rad, Richmond, Calif., USA) (http://www.bio-rad.com/LifeScience/pdf/New_Gene_Pulser.pdf). See also, Norton et al. (eds.), Gene Transfer Methods: Introducing DNA into Living Cells and Organisms, BioTechniques Books, Eaton Publishing Co. (2000) (ISBN 1-881299-34-1), incorporated herein by reference in its entirety.

[0417] Other transfection techniques include transfection by particle embardment. See, e.g., Cheng et al., Proc. Natl. Acad. Sci. USA 90(10):4455-9 (1993); Yang et al., Proc. Natl. Acad. Sci. USA 87(24):9568-72 (1990).

[0418] Proteins

[0419] In another aspect, the present invention provides MDZ3, MDZ4, MDZ7 and MDZ12 proteins, respectively, various fragments thereof suitable for use as antigens (e.g., for epitope mapping) and for use as immunogens (e.g., for raising antibodies or as vaccines), fusions of MDZ3, MDZ4, MDZ7 and MDZ12 polypeptides and fragments to heterologous polypeptides, and conjugates of the proteins, fragments, and fusions of the present invention to other moieties (e.g., to carrier proteins, to fluorophores).

[0420] FIGS. 3, 6, 9, 12 and 13 present the predicted amino acid sequences encoded by the MDZ3, MDZ4, MDZ7, MDZ12a and MDZ12b (S and L) cDNA clones, respectively. The amino acid sequences are further presented, respectively, in SEQ ID Nos: 3, 3029, 4409, 5772, 6939 and 6940.

[0421] Unless otherwise indicated, amino acid sequences of the proteins of the present invention were determined as a predicted translation from a nucleic acid sequence. Accordingly, any amino acid sequence presented herein may contain errors due to errors in the nucleic acid sequence, as described in detail above. Furthermore, single nucleotide polymorphisms (SNPs) occur frequently in eukaryotic genomes—more than 1.4 million SNPs have already identified in the human genome, International Human Genome Sequencing Consortium, Nature 409:860-921 (2001)—and the sequence determined from one individual of a species may differ from other allelic forms present within the population. Small deletions and insertions can often be found that do not alter the function of the protein.

[0422] Accordingly, it is an aspect of the present invention to provide proteins not only identical in sequence to those described with particularity herein, but also to provide isolated proteins at least about 65% identical in sequence to those described with particularity herein, typically at least about 70%, 75%, 80%, 85%, or 90% identical in sequence to those described with particularity herein, usefully at least about 91%, 92%, 93%, 94%, or 95% identical in sequence to those described with particularity herein, usefully at least about 96%, 97%, 98%, or 99% identical in sequence to those described with particularity herein, and, most conservatively, at least about 99.5%, 99.6%, 99.7%, 99.8% and 99.9% identical in sequence to those described with particularity herein. These sequence variants can be naturally occurring or can result from human intervention by way of random or directed mutagenesis.

[0423] For purposes herein, percent identity of two amino acid sequences is determined using the procedure of Tatiana et al., “Blast 2 sequences—a new tool for comparing protein and nucleotide sequences”, FEMS Microbiol Lett. 174:247-250 (1999), which procedure is effectuated by the computer program BLAST 2 SEQUENCES, available online at

[0424] http://www.ncbi.nlm.nih.gov/blast/bl2seq/bl2.html,

[0425] To assess percent identity of amino acid sequences, the BLASTP module of BLAST 2 SEQUENCES is used with default values of (i) BLOSUM62 matrix, Henikoff et al., Proc. Natl. Acad. Sci USA 89(22):10915-9 (1992); (ii) open gap 11 and extension gap 1 penalties; and (iii) gap x_dropoff 50 expect 10 word size 3 filter, and both sequences are entered in their entireties.

[0426] As is well known, amino acid substitutions occur frequently among natural allelic variants, with conservative substitutions often occasioning only de minimis change in protein function.

[0427] Accordingly, it is an aspect of the present invention to provide proteins not only identical in sequence to those described with particularity herein, but also to provide isolated proteins having the sequence of MDZ3, MDZ4, MDZ7 and MDZ12 proteins, respectively, or portions thereof, with conservative amino acid substitutions. It is a further aspect to provide isolated proteins having the sequence of MDZ3, MDZ4, MDZ7 and MDZ12 proteins, respectively, and portions thereof, with moderately conservative amino acid substitutions. These conservatively-substituted and moderately conservatively-substituted variants can be naturally occurring or can result from human intervention.

[0428] Although there are a variety of metrics for calling conservative amino acid substitutions, based primarily on either observed changes among evolutionarily related proteins or on predicted chemical similarity, for purposes herein a conservative replacement is any change having a positive value in the PAM250 log-likelihood matrix reproduced herein below (see Gonnet et al., Science 256(5062):1443-5 (1992)):

$$\begin{matrix} & A & R & N & D & C & Q & E & G & H & I & L & K & M & F & P & S & T & W & Y & V \\ A & 2 & - 1 & 0 & 0 & 0 & 0 & 0 & 0 & - 1 & - 1 & - 1 & 0 & - 1 & - 2 & 0 & 1 & 1 & - 4 & - 2 & 0 \\ R & - 1 & 5 & 0 & 0 & - 2 & 2 & 0 & - 1 & 1 & - 2 & - 2 & 3 & - 2 & - 3 & - 1 & 0 & 0 & - 2 & - 2 & - 2 \\ N & 0 & 0 & 4 & 2 & - 2 & 1 & 1 & 0 & 1 & - 3 & - 3 & 1 & - 2 & - 3 & - 1 & 1 & 0 & - 4 & - 1 & - 2 \\ D & 0 & 0 & 2 & 5 & - 3 & 1 & 3 & 0 & 0 & - 4 & - 4 & 0 & - 3 & - 4 & - 1 & 0 & 0 & - 5 & - 3 & - 3 \\ C & 0 & - 2 & - 2 & - 3 & 12 & - 2 & - 3 & - 2 & - 1 & - 1 & - 2 & - 3 & - 1 & - 1 & - 3 & 0 & 0 & - 1 & 0 & 0 \\ Q & 0 & 2 & 1 & 1 & - 2 & 3 & 2 & - 1 & 1 & - 2 & - 2 & 2 & - 1 & - 3 & 0 & 0 & 0 & - 3 & - 2 & - 2 \\ E & 0 & 0 & 1 & 3 & - 3 & 2 & 4 & - 1 & 0 & - 3 & - 3 & 1 & - 2 & - 4 & 0 & 0 & 0 & - 4 & - 3 & - 2 \\ G & 0 & - 1 & 0 & 0 & - 2 & - 1 & - 1 & 7 & - 1 & - 4 & - 4 & - 1 & - 4 & - 5 & - 2 & 0 & - 1 & - 4 & - 4 & - 3 \\ H & - 1 & 1 & 1 & 0 & - 1 & 1 & 0 & - 1 & 6 & - 2 & - 2 & 1 & - 1 & 0 & - 1 & 0 & 0 & - 1 & 2 & - 2 \\ I & - 1 & - 2 & - 3 & - 4 & - 1 & - 2 & - 3 & - 4 & - 2 & 4 & 3 & - 2 & 2 & 1 & - 3 & - 2 & - 1 & - 2 & - 1 & 3 \\ L & - 1 & - 2 & - 3 & - 4 & - 2 & - 2 & - 3 & - 4 & - 2 & 3 & 4 & - 2 & 3 & 2 & - 2 & - 2 & - 1 & - 1 & 0 & 2 \\ K & 0 & 3 & 1 & 0 & - 3 & 2 & 1 & - 1 & 1 & - 2 & - 2 & 3 & - 1 & - 3 & - 1 & 0 & 0 & - 4 & - 2 & - 2 \\ M & - 1 & - 2 & - 2 & - 3 & - 1 & - 1 & - 2 & - 4 & - 1 & 2 & 3 & - 1 & 4 & 2 & - 2 & - 1 & - 1 & - 1 & 0 & 2 \\ F & - 2 & - 3 & - 3 & - 4 & - 1 & - 3 & - 4 & - 5 & 0 & 1 & 2 & - 3 & 2 & 7 & - 4 & - 3 & - 2 & 4 & 5 & 0 \\ P & 0 & - 1 & - 1 & - 1 & - 3 & 0 & 0 & - 2 & - 1 & - 3 & - 2 & - 1 & - 2 & - 4 & 8 & 0 & 0 & - 5 & - 3 & - 2 \\ S & 1 & 0 & 1 & 0 & 0 & 0 & 0 & 0 & 0 & - 2 & - 2 & 0 & - 1 & - 3 & 0 & 2 & 2 & - 3 & - 2 & - 1 \\ T & 1 & 0 & 0 & 0 & 0 & 0 & 0 & - 1 & 0 & - 1 & - 1 & 0 & - 1 & - 2 & 0 & 2 & 2 & - 4 & - 2 & 0 \\ W & - 4 & - 2 & - 4 & - 5 & - 1 & - 3 & - 4 & - 4 & - 1 & - 2 & - 1 & - 4 & - 1 & 4 & - 5 & - 3 & - 4 & 14 & 4 & - 3 \\ Y & - 2 & - 2 & - 1 & - 3 & 0 & - 2 & - 3 & - 4 & 2 & - 1 & 0 & - 2 & 0 & 5 & - 3 & - 2 & - 2 & 4 & 8 & - 1 \\ V & 0 & - 2 & - 2 & - 3 & 0 & - 2 & - 2 & - 3 & - 2 & 3 & 2 & - 2 & 2 & 0 & - 2 & - 1 & 0 & - 3 & - 1 & 3\end{matrix}$$

[0429] For purposes herein, a “moderately conservative” replacement is any change having a nonnegative value in the PAM250 log-likelihood matrix reproduced herein above.

[0430] As is also well known in the art, relatedness of proteins can also be characterized using a functional test, the ability of the encoding nucleic acids to base-pair to one another at defined hybridization stringencies.

[0431] It is, therefore, another aspect of the invention to provide isolated proteins not only identical in sequence to those described with particularity herein, but also to provide isolated proteins (“hybridization related proteins”) that are encoded by nucleic acids that hybridize under high stringency conditions (as defined herein above) to all or to a portion of various of the isolated nucleic acids of the present invention (“reference nucleic acids”). It is a further aspect of the invention to provide isolated proteins (“hybridization related proteins”) that are encoded by nucleic acids that hybridize under moderate stringency conditions (as defined herein above) to all or to a portion of various of the isolated nucleic acids of the present invention (“reference nucleic acids”).

[0432] The hybridization related proteins can be alternative isoforms, homologues, paralogues, and orthologues of the MDZ3, MDZ4, MDZ7 and MDZ12 proteins, respectively, of the present invention. Particularly useful orthologues are those from other primate species, such as chimpanzee, rhesus macaque monkey, baboon, orangutan, and gorilla, from rodents, such as rats, mice, guinea pigs; from lagomorphs, such as rabbits, and from domestic livestock, such as cow, pig, sheep, horse, and goat.

[0433] Relatedness of proteins can also be characterized using a second functional test, the ability of a first protein competitively to inhibit the binding of a second protein to an antibody.

[0434] It is, therefore, another aspect of the present invention to provide isolated proteins not only identical in sequence to those described with particularity herein, but also to provide isolated proteins (“cross-reactive proteins”) that competitively inhibit the binding of antibodies to all or to a portion of various of the isolated MDZ3, MDZ4, MDZ7 and MDZ12 proteins, respectively, of the present invention (“reference proteins”). Such competitive inhibition can readily be determined using immunoassays well known in the art.

[0435] Among the proteins of the present invention that differ in amino acid sequence from those described with particularity herein—including those that have deletions and insertions causing up to 10% non-identity, those having conservative or moderately conservative substitutions, hybridization related proteins, and cross-reactive proteins—those that substantially retain one or more MDZ3, MDZ4, MDZ7 or MDZ12 activities are particularly useful. As described above, those activities include transcription regulation and protein-protein interaction.

[0436] Residues that are tolerant of change while retaining function can be identified by altering the protein at known residues using methods known in the art, such as alanine scanning mutagenesis, Cunningham et al., Science 244(4908):1081-5 (1989); transposon linker scanning mutagenesis, Chen et al., Gene 263(1-2):39-48 (2001); combinations of homolog- and alanine-scanning mutagenesis, Jin et al., J. Mol. Biol. 226(3):851-65 (1992); combinatorial alanine scanning, Weiss et al., Proc. Natl. Acad. Sci USA 97(16):8950-4 (2000), followed by functional assay. Transposon linker scanning kits are available commercially (New England Biolabs, Beverly, Mass., USA, catalog. no. E7-102S; EZ::TN™ In-Frame Linker Insertion Kit, catalogue no. EZI04KN, Epicentre Technologies Corporation, Madison, Wis., USA).

[0437] As further described below, the isolated proteins of the present invention can readily be used as specific immunogens to raise antibodies that specifically recognize MDZ3, MDZ4, MDZ7 or MDZ12 (MDZ12a, MDZ12bS, MDZ12bL) proteins, their isoforms, homologues, paralogues, and/or orthologues. The antibodies, in turn, can be used, inter alia, specifically to assay for the MDZ3, MDZ4, MDZ7 or MDZ12 proteins of the present invention—e.g. by ELISA for detection of protein fluid samples, such as serum, by immunohistochemistry or laser scanning cytometry, for detection of protein in tissue samples, or by flow cytometry, for detection of intracellular protein in cell suspensions—for specific antibody-mediated isolation and/or purification of MDZ3, MDZ4, MDZ7 or MDZ12 proteins, as for example by immunoprecipitation, and for use as specific agonists or antagonists of MDZ3, MDZ4, MDZ7 or MDZ12 action.

[0438] The isolated proteins of the present invention are also immediately available for use as specific standards in assays used to determine the concentration and/or amount specifically of the MDZ3, MDZ4, MDZ7 or MDZ12 proteins of the present invention. As is well known, ELISA kits for detection and quantitation of protein analytes typically include isolated and purified protein of known concentration for use as a measurement standard (e.g., the human interferon-γ OptEIA kit, catalog no. 555142, Pharmingen, San Diego, Calif., USA includes human recombinant gamma interferon, baculovirus produced).

[0439] The isolated proteins of the present invention are also immediately available for use as specific biomolecule capture probes for surface-enhanced laser desorption ionization (SELDI) detection of protein-protein interactions, WO 98/59362; WO 98/59360; WO 98/59361; and Merchant et al., Electrophoresis 21(6):1164-77 (2000), the disclosures of which are incorporated herein by reference in their entireties. Analogously, the isolated proteins of the present invention are also immediately available for use as specific biomolecule capture probes on BIACORE surface plasmon resonance probes. See Weinberger et al., Pharmacogenomics 1(4):395-416 (2000); Malmqvist, Biochem. Soc. Trans. 27(2):335-40 (1999).

[0440] The isolated proteins of the present invention are also useful as a therapeutic supplement in patients having a specific deficiency in MDZ3, MDZ4, MDZ7 or MDZ12 production, respectively.

[0441] In another aspect, the invention also provides fragments of various of the proteins of the present invention. The protein fragments are useful, inter alia, as antigenic and immunogenic fragments of MDZ3, MDZ4, MDZ7 or MDZ12, respectively.

[0442] By “fragments” of a protein is here intended isolated proteins (equally, polypeptides, peptides, oligopeptides), however obtained, that have an amino acid sequence identical to a portion of the reference amino acid sequence, which portion is at least 6 amino acids and less than the entirety of the reference nucleic acid. As so defined, “fragments” need not be obtained by physical fragmentation of the reference protein, although such provenance is not thereby precluded.

[0443] Fragments of at least 6 contiguous amino acids are useful in mapping B cell and T cell epitopes of the reference protein. See, e.g., Geysen et al., “Use of peptide synthesis to probe viral antigens for epitopes to a resolution of a single amino acid,” Proc. Natl. Acad. Sci. USA 81:3998-4002 (1984) and U.S. Pat. Nos. 4,708,871 and 5,595,915, the disclosures of which are incorporated herein by reference in their entireties. Because the fragment need not itself be immunogenic, part of an immunodominant epitope, nor even recognized by native antibody, to be useful in such epitope mapping, all fragments of at least 6 amino acids of the proteins of the present invention have utility in such a study.

[0444] Fragments of at least 8 contiguous amino acids, often at least 15 contiguous amino acids, have utility as immunogens for raising antibodies that recognize the proteins of the present invention. See, e.g., Lerner, “Tapping the immunological repertoire to produce antibodies of predetermined specificity,” Nature 299:592-596 (1982); Shinnick et al., “Synthetic peptide immunogens as vaccines,” Annu. Rev. Microbiol. 37:425-46 (1983); Sutcliffe et al., “Antibodies that react with predetermined sites on proteins,” Science 219:660-6 (1983), the disclosures of which are incorporated herein by reference in their entireties. As further described in the above-cited references, virtually all 8-mers, conjugated to a carrier, such as a protein, prove immunogenic—that is, prove capable of eliciting antibody for the conjugated peptide; accordingly, all fragments of at least 8 amino acids of the proteins of the present invention have utility as immunogens.

[0445] Fragments of at least 8, 9, 10 or 12 contiguous amino acids are also useful as competitive inhibitors of binding of the entire protein, or a portion thereof, to antibodies (as in epitope mapping), and to natural binding partners, such as subunits in a multimeric complex or to receptors or ligands of the subject protein; this competitive inhibition permits identification and separation of molecules that bind specifically to the protein of interest, U.S. Pat. Nos. 5,539,084 and 5,783,674, incorporated herein by reference in their entireties.

[0446] The protein, or protein fragment, of the present invention is thus at least 6 amino acids in length, typically at least 8, 9, 10 or 12 amino acids in length, and often at least 15 amino acids in length. Often, the protein or the present invention, or fragment thereof, is at least 20 amino acids in length, even 25 amino acids, 30 amino acids, 35 amino acids, or 50 amino acids or more in length. Of course, larger fragments having at least 75 amino acids, 100 amino acids, or even 150 amino acids are also useful, and at times preferred.

[0447] The present invention further provides fusions of each of the proteins and protein fragments of the present invention to heterologous polypeptides.

[0448] By fusion is here intended that the protein or protein fragment of the present invention is linearly contiguous to the heterologous polypeptide in a peptide-bonded polymer of amino acids or amino acid analogues; by “heterologous polypeptide” is here intended a polypeptide that does not naturally occur in contiguity with the protein or protein fragment of the present invention. As so defined, the fusion can consist entirely of a plurality of fragments of any one of the MDZ3, MDZ4, MDZ7 or MDZ12 proteins, respectively, in altered arrangement; in such case, any of the MDZ3, MDZ4, MDZ7 or MDZ12 fragments can be considered heterologous to the other MDZ3, MDZ4, MDZ7 or MDZ12 fragments in the fusion protein. More typically, however, the heterologous polypeptide is not drawn from the MDZ3, MDZ4, MDZ7 or MDZ12 protein itself.

[0449] The fusion proteins of the present invention will include at least one fragment of the protein of the present invention, which fragment is at least 6, typically at least 8, often at least 15, and usefully at least 16, 17, 18, 19, or 20 amino acids long. The fragment of the protein of the present to be included in the fusion can usefully be at least 25 amino acids long, at least 50 amino acids long, and can be at least 75, 100, or even 150 amino acids long. Fusions that include the entirety of the proteins of the present invention have particular utility.

[0450] The heterologous polypeptide included within the fusion protein of the present invention is at least 6 amino acids in length, often at least 8 amino acids in length, and usefully at least 15, 20, and 25 amino acids in length. Fusions that include larger polypeptides, such as the IgG Fc region, and even entire proteins (such as GFP chromophore-containing proteins), have particular utility.

[0451] As described above in the description of vectors and expression vectors of the present invention, which discussion is incorporated herein by reference in its entirety, heterologous polypeptides to be included in the fusion proteins of the present invention can usefully include those designed to facilitate purification and/or visualization of recombinantly-expressed proteins. Although purification tags can also be incorporated into fusions that are chemically synthesized, chemical synthesis typically provides sufficient purity that further purification by HPLC suffices; however, visualization tags as above described retain their utility even when the protein is produced by chemical synthesis, and when so included render the fusion proteins of the present invention useful as directly detectable markers of MDZ3, MDZ4, MDZ7 or MDZ12 presence.

[0452] As also discussed above, heterologous polypeptides to be included in the fusion proteins of the present invention can usefully include those that facilitate secretion of recombinantly expressed proteins—into the periplasmic space or extracellular milieu for prokaryotic hosts, into the culture medium for eukaryotic cells—through incorporation of secretion signals and/or leader sequences.

[0453] Other useful protein fusions of the present invention include those that permit use of the protein of the present invention as bait in a yeast two-hybrid system. See Bartel et al. (eds.), The Yeast Two-Hybrid System, Oxford University Press (1997) (ISBN: 0195109384); Zhu et al., Yeast Hybrid Technologies, Eaton Publishing, (2000) (ISBN 1-881299-15-5); Fields et al., Trends Genet. 10(8):286-92 (1994); Mendelsohn et al., Curr. Opin. Biotechnol. 5(5):482-6 (1994); Luban et al., Curr. Opin. Biotechnol. 6(1):59-64 (1995); Allen et al., Trends Biochem. Sci. 20(12):511-6 (1995); Drees, Curr. Opin. Chem. Biol. 3(1):64-70 (1999); Topcu et al., Pharm. Res. 17(9):1049-55 (2000); Fashena et al., Gene 250(1-2):1-14 (2000), the disclosures of which are incorporated herein by reference in their entireties. Typically, such fusion is to either E. coli LexA or yeast GAL4 DNA binding domains. Related bait plasmids are available that express the bait fused to a nuclear localization signal.

[0454] Other useful protein fusions include those that permit display of the encoded protein on the surface of a phage or cell, fusions to intrinsically fluorescent proteins, such as green fluorescent protein (GFP), and fusions to the IgG Fc region, as described above, which discussion is incorporated here by reference in its entirety.

[0455] The proteins and protein fragments of the present invention can also usefully be fused to protein toxins, such as Pseudomonas exotoxin A, diphtheria toxin, shiga toxin A, anthrax toxin lethal factor, ricin, in order to effect ablation of cells that bind or take up the proteins of the present invention.

[0456] The isolated proteins, protein fragments, and protein fusions of the present invention can be composed of natural amino acids linked by native peptide bonds, or can contain any or all of nonnatural amino acid analogues, nonnative bonds, and post-synthetic (post translational) modifications, either throughout the length of the protein or localized to one or more portions thereof.

[0457] As is well known in the art, when the isolated protein is used, e.g., for epitope mapping, the range of such nonnatural analogues, nonnative inter-residue bonds, or post-synthesis modifications will be limited to those that permit binding of the peptide to antibodies. When used as an immunogen for the preparation of antibodies in a non-human host, such as a mouse, the range of such nonnatural analogues, nonnative inter-residue bonds, or post-synthesis modifications will be limited to those that do not interfere with the immunogenicity of the protein. When the isolated protein is used as a therapeutic agent, such as a vaccine or for replacement therapy, the range of such changes will be limited to those that do not confer toxicity upon the isolated protein.

[0458] Non-natural amino acids can be incorporated during solid phase chemical synthesis or by recombinant techniques, although the former is typically more common.

[0459] Solid phase chemical synthesis of peptides is well established in the art. Procedures are described, inter alia, in Chan et al. (eds.), Fmoc Solid Phase Peptide Synthesis: A Practical Approach (Practical Approach Series), Oxford Univ. Press (March 2000) (ISBN: 0199637245); Jones, Amino Acid and Peptide Synthesis (Oxford Chemistry Primers, No 7), Oxford Univ. Press (August 1992) (ISBN: 0198556683); and Bodanszky, Principles of Peptide Synthesis (Springer Laboratory), Springer Verlag (December 1993) (ISBN: 0387564314), the disclosures of which are incorporated herein by reference in their entireties.

[0460] For example, D-enantiomers of natural amino acids can readily be incorporated during chemical peptide synthesis: peptides assembled from D-amino acids are more resistant to proteolytic attack; incorporation of D-enantiomers can also be used to confer specific three dimensional conformations on the peptide. Other amino acid analogues commonly added during chemical synthesis include ornithine, norleucine, phosphorylated amino acids (typically phosphoserine, phosphothreonine, phosphotyrosine), L-malonyltyrosine, a non-hydrolyzable analog of phosphotyrosine (Kole et al., Biochem. Biophys. Res. Com. 209:817-821 (1995)), and various halogenated phenylalanine derivatives.

[0461] Amino acid analogues having detectable labels are also usefully incorporated during synthesis to provide a labeled polypeptide.

[0462] Biotin, for example (indirectly detectable through interaction with avidin, streptavidin, neutravidin, captavidin, or anti-biotin antibody), can be added using biotinoyl--(9-fluorenylmethoxycarbonyl)-L-lysine (FMOC biocytin) (Molecular Probes, Eugene, Oreg., USA). (Biotin can also be added enzymatically by incorporation into a fusion protein of a E. coli BirA substrate peptide.) The FMOC and tBOC derivatives of dabcyl-L-lysine (Molecular Probes, Inc., Eugene, Oreg., USA) can be used to incorporate the dabcyl chromophore at selected sites in the peptide sequence during synthesis. The aminonaphthalene derivative EDANS, the most common fluorophore for pairing with the dabcyl quencher in fluorescence resonance energy transfer (FRET) systems, can be introduced during automated synthesis of peptides by using EDANS--FMOC-L-glutamic acid or the corresponding tBOC derivative (both from Molecular Probes, Inc., Eugene, Oreg., USA). Tetramethylrhodamine fluorophores can be incorporated during automated FMOC synthesis of peptides using (FMOC)--TMR-L-lysine (Molecular Probes, Inc. Eugene, Oreg., USA).

[0463] Other useful amino acid analogues that can be incorporated during chemical synthesis include aspartic acid, glutamic acid, lysine, and tyrosine analogues having allyl side-chain protection (Applied Biosystems, Inc., Foster City, Calif., USA); the allyl side chain permits synthesis of cyclic, branched-chain, sulfonated, glycosylated, and phosphorylated peptides.

[0464] A large number of other EMOC-protected non-natural amino acid analogues capable of incorporation during chemical synthesis are available commercially, including, e.g., Fmoc-2-aminobicyclo[2.2.1]heptane-2-carboxylic acid, Fmoc-3-endo-aminobicyclo[2.2.1]heptane-2-endo-carboxylic acid, Fmoc-3-exo-aminobicyclo[2.2.1]heptane-2-exo-carboxylic acid, Fmoc-3-endo-amino-bicyclo[2.2.1]hept-5-ene-2-endo-carboxylic acid, Fmoc-3-exo-amino-bicyclo[2.2.1]hept-5-ene-2-exo-carboxylic acid, Fmoc-cis-2-amino-1-cyclohexanecarboxylic acid, Fmoc-trans-2-amino-1-cyclohexanecarboxylic acid, Fmoc-1-amino-1-cyclopentanecarboxylic acid, Fmoc-cis-2-amino-1-cyclopentanecarboxylic acid, Fmoc-1-amino-1-cyclopropanecarboxylic acid, Fmoc-D-2-amino-4-(ethylthio)butyric acid, Fmoc-L-2-amino-4-(ethylthio)butyric acid, Fmoc-L-buthionine, Fmoc-S-methyl-L-Cysteine, FMoc-2-aminobenzoic acid (anthranillic acid), Fmoc-3-aminobenzoic acid, Fmoc-4-aminobenzoic acid, Fmoc-2-aminobenzophenone-2′-carboxylic acid, Fmoc-N-(4-aminobenzoyl)-b-alanine, Fmoc-2-amino-4,5-dimethoxybenzoic acid, Fmoc-4-aminohippuric acid, Fmoc-2-amino-3-hydroxybenzoic acid, Fmoc-2-amino-5-hydroxybenzoic acid, Fmoc-3-amino-4-hydroxybenzoic acid, Fmoc-4-amino-3-hydroxybenzoic acid, Fmoc-4-amino-2-hydroxybenzoic acid, Fmoc-5-amino-2-hydroxybenzoic acid, Fmoc-2-amino-3-methoxybenzoic acid, Fmoc-4-amino-3-methoxybenzoic acid, Fmoc-2-amino-3-methylbenzoic acid, Fmoc-2-amino-5-methylbenzoic acid, Fmoc-2-amino-6-methylbenzoic acid, Fmoc-3-amino-2-methylbenzoic acid, Fmoc-3-amino-4-methylbenzoic acid, Fmoc-4-amino-3-methylbenzoic acid, Fmoc-3-amino-2-naphtoic acid, Fmoc-D,L-3-amino-3-phenyipropionic acid, Fmoc-L-Methyldopa, Fmoc-2-amino-4,6-dimethyl-3-pyridinecarboxylic acid, Fmoc-D,L-?-amino-2-thiophenacetic acid, Fmoc-4-(carboxymethyl)piperazine, Fmoc-4-carboxypiperazine, Fmoc-4-(carboxymethyl)homopiperazine, Fmoc-4-phenyl-4-piperidinecarboxylic acid, Fmoc-L-1,2,3,4-tetrahydronorharman-3-carboxylic acid, Fmoc-L-thiazolidine-4-carboxylic acid, all available from The Peptide Laboratory (Richmond, Calif., USA).

[0465] Non-natural residues can also be added biosynthetically by engineering a suppressor tRNA, typically one that recognizes the UAG stop codon, by chemical aminoacylation with the desired unnatural amino acid and. Conventional site-directed mutagenesis is used to introduce the chosen stop codon UAG at the site of interest in the protein gene. When the acylated suppressor tRNA and the mutant gene are combined in an in vitro transcription/translation system, the unnatural amino acid is incorporated in response to the UAG codon to give a protein containing that amino acid at the specified position. Liu et al., Proc. Natl Acad. Sci. USA 96(9):4780-5 (1999); Wang et al., Science 292(5516):498-500 (2001).

[0466] The isolated proteins, protein fragments and fusion proteins of the present invention can also include nonnative inter-residue bonds, including bonds that lead to circular and branched forms.

[0467] The isolated proteins and protein fragments of the present invention can also include post-translational and post-synthetic modifications, either throughout the length of the protein or localized to one or more portions thereof.

[0468] For example, when produced by recombinant expression in eukaryotic cells, the isolated proteins, fragments, and fusion proteins of the present invention will typically include N-linked and/or O-linked glycosylation, the pattern of which will reflect both the availability of glycosylation sites on the protein sequence and the identity of the host cell. Further modification of glycosylation pattern can be performed enzymatically.

[0469] As another example, recombinant polypeptides of the invention may also include an initial modified methionine residue, in some cases resulting from host-mediated processes.

[0470] When the proteins, protein fragments, and protein fusions of the present invention are produced by chemical synthesis, post-synthetic modification can be performed before deprotection and cleavage from the resin or after deprotection and cleavage. Modification before deprotection and cleavage of the synthesized protein often allows greater control, e.g. by allowing targeting of the modifying moiety to the N-terminus of a resin-bound synthetic peptide.

[0471] Useful post-synthetic (and post-translational) modifications include conjugation to detectable labels, such as fluorophores.

[0472] A wide variety of amine-reactive and thiol-reactive fluorophore derivatives have been synthesized that react under nondenaturing conditions with N-terminal amino groups and epsilon amino groups of lysine residues, on the one hand, and with free thiol groups of cysteine residues, on the other.

[0473] Kits are available commercially that permit conjugation of proteins to a variety of amine-reactive or thiol-reactive fluorophores: Molecular Probes, Inc. (Eugene, Oreg., USA), e.g., offers kits for conjugating proteins to Alexa Fluor 350, Alexa Fluor 430, Fluorescein-EX, Alexa Fluor 488, Oregon Green 488, Alexa Fluor 532, Alexa Fluor 546, Alexa Fluor 546, Alexa Fluor 568, Alexa Fluor 594, and Texas Red-X.

[0474] A wide variety of other amine-reactive and thiol-reactive fluorophores are available commercially (Molecular Probes, Inc., Eugene, Oreg., USA), including Alexa Fluor® 350, Alexa Fluor® 488, Alexa Fluor® 532, Alexa Fluor® 546, Alexa Fluor® 568, Alexa Fluor® 594, Alexa Fluor® 647 (monoclonal antibody labeling kits available from Molecular Probes, Inc., Eugene, Oreg., USA), BODIPY dyes, such as BODIPY 493/503, BODIPY FL, BODIPY R6G, BODIPY 530/550, BODIPY TMR, BODIPY 558/568, BODIPY 558/568, BODIPY 564/570, BODIPY 576/589, BODIPY 581/591, BODIPY TR, BODIPY 630/650, BODIPY 650/665, Cascade Blue, Cascade Yellow, Dansyl, lissamine rhodamine B, Marina Blue, Oregon Green 488, Oregon Green 514, Pacific Blue, rhodamine 6G, rhodamine green, rhodamine red, tetramethylrhodamine, Texas Red (available from Molecular Probes, Inc., Eugene, Oreg., USA).

[0475] The polypeptides of the present invention can also be conjugated to fluorophores, other proteins, and other macromolecules, using bifunctional linking reagents.

[0476] Common homobifunctional reagents include, e.g., APG, AEDP, BASED, BMB, BMDB, BMH, BMOE, BM[PEO]3, BM[PEO]4, BS3, BSOCOES, DFDNB, DMA, DMP, DMS, DPDPB, DSG, DSP (Lomant's Reagent), DSS, DST, DTBP, DTME, DTSSP, EGS, HBVS, Sulfo-BSOCOES, Sulfo-DST, Sulfo-EGS (all available from Pierce, Rockford, Ill., USA); common heterobifunctional cross-linkers include ABH, AMAS, ANB-NOS, APDP, ASBA, BMPA, BMPH, BMPS, EDC, EMCA, EMCH, EMCS, KMUA, KMUH, GMBS, LC-SMCC, LC-SPDP, MBS, M2C2H, MPBH, MSA, NHS-ASA, PDPH, PMPI, SADP, SAED, SAND, SANPAH, SASD, SATP, SBAP, SFAD, SIA, SIAB, SMCC, SMPB, SMPH, SMPT, SPDP, Sulfo-EMCS, Sulfo-GMBS, Sulfo-HSAB, Sulfo-KMUS, Sulfo-LC-SPDP, Sulfo-MBS, Sulfo-NHS-LC-ASA, Sulfo-SADP, Sulfo-SANPAH, Sulfo-SIAB, Sulfo-SMCC, Sulfo-SMPB, Sulfo-LC-SMPT, SVSB, TFCS (all available Pierce, Rockford, Ill., USA).

[0477] The proteins, protein fragments, and protein fusions of the present invention can be conjugated, using such cross-linking reagents, to fluorophores that are not amine- or thiol-reactive.

[0478] Other labels that usefully can be conjugated to the proteins, protein fragments, and fusion proteins of the present invention include radioactive labels, echosonographic contrast reagents, and MRI contrast agents.

[0479] The proteins, protein fragments, and protein fusions of the present invention can also usefully be conjugated using cross-linking agents to carrier proteins, such as KLH, bovine thyroglobulin, and even bovine serum albumin (BSA), to increase immunogenicity for raising anti-MDZ3, anti-MDZ4, anti-MDZ7 or anti-MDZ12 antibodies.

[0480] The proteins, protein fragments, and protein fusions of the present invention can also usefully be conjugated to polyethylene glycol (PEG); PEGylation increases the serum half life of proteins administered intravenously for replacement therapy. Delgado et al., Crit. Rev. Ther. Drug Carrier Syst. 9(3-4):249-304 (1992); Scott et al., Curr. Pharm. Des. 4(6):423-38 (1998); DeSantis et al., Curr. Opin. Biotechnol. 10(4):324-30 (1999), incorporated herein by reference in their entireties. PEG monomers can be attached to the protein directly or through a linker, with PEGylation using PEG monomers activated with tresyl chloride (2,2,2-trifluoroethanesulphonyl chloride) permitting direct attachment under mild conditions.

[0481] The isolated proteins of the present invention, including fusions thereof, can be produced by recombinant expression, typically using the expression vectors of the present invention as above-described or, if fewer than about 100 amino acids, by chemical synthesis (typically, solid phase synthesis), and, on occasion, by in vitro translation.

[0482] Production of the isolated proteins of the present invention can optionally be followed by purification.

[0483] Purification of recombinantly expressed proteins is now well within the skill in the art. See, e.g., Thorner et al. (eds.), Applications of Chimeric Genes and Hybrid Proteins, Part A: Gene Expression and Protein Purification (Methods in Enzymology, Volume 326), Academic Press (2000), (ISBN: 0121822273); Harbin (ed.), Cloning, Gene Expression and Protein Purification: Experimental Procedures and Process Rationale, Oxford Univ. Press (2001) (ISBN: 0195132947); Marshak et al., Strategies for Protein Purification and Characterization: A Laboratory Course Manual, Cold Spring Harbor Laboratory Press (1996) (ISBN: 0-87969-385-1); and Roe (ed.), Protein Purification Applications, Oxford University Press (2001), the disclosures of which are incorporated herein by reference in their entireties, and thus need not be detailed here.

[0484] Briefly, however, if purification tags have been fused through use of an expression vector that appends such tag, purification can be effected, at least in part, by means appropriate to the tag, such as use of immobilized metal affinity chromatography for polyhistidine tags. Other techniques common in the art include ammonium sulfate fractionation, immunoprecipitation, fast protein liquid chromatography (FPLC), high performance liquid chromatography (HPLC), and preparative gel electrophoresis.

[0485] Purification of chemically-synthesized peptides can readily be effected, e.g., by HPLC.

[0486] Accordingly, it is an aspect of the present invention to provide the isolated proteins of the present invention in pure or substantially pure form.

[0487] A purified protein of the present invention is an isolated protein, as above described, that is present at a concentration of at least 95%, as measured on a weight basis (w/w) with respect to total protein in a composition. Such purities can often be obtained during chemical synthesis without further purification, as, e.g., by HPLC. Purified proteins of the present invention can be present at a concentration (measured on a weight basis with respect to total protein in a composition) of 96%, 97%, 98%, and even 99%. The proteins of the present invention can even be present at levels of 99.5%, 99.6%, and even 99.7%, 99.8%, or even 99.9% following purification, as by HPLC.

[0488] Although high levels of purity are particularly useful when the isolated proteins of the present invention are used as therapeutic agents—such as vaccines, or for replacement therapy—the isolated proteins of the present invention are also useful at lower purity. For example, partially purified proteins of the present invention can be used as immunogens to raise antibodies in laboratory animals.

[0489] Thus, in another aspect, the present invention provides the isolated proteins of the present invention in substantially purified form. A “substantially purified protein” of the present invention is an isolated protein, as above described, present at a concentration of at least 70%, measured on a weight basis with respect to total protein in a composition. Usefully, the substantially purified protein is present at a concentration, measured on a weight basis with respect to total protein in a composition, of at least 75%, 80%, or even at least 85%, 90%, 91%, 92%, 93%, 94%, 94.5% or even at least 94.9%.

[0490] In preferred embodiments, the purified and substantially purified proteins of the present invention are in compositions that lack detectable ampholytes, acrylamide monomers, bis-acrylamide monomers, and polyacrylamide.

[0491] The proteins, fragments, and fusions of the present invention can usefully be attached to a substrate. The substrate can porous or solid, planar or non-planar; the bond can be covalent or noncovalent.

[0492] For example, the proteins, fragments, and fusions of the present invention can usefully be bound to a porous substrate, commonly a membrane, typically comprising nitrocellulose, polyvinylidene fluoride (PVDF), or cationically derivatized, hydrophilic PVDF; so bound, the proteins, fragments, and fusions of the present invention can be used to detect and quantify antibodies, e.g. in serum, that bind specifically to the immobilized protein of the present invention.

[0493] As another example, the proteins, fragments, and fusions of the present invention can usefully be bound to a substantially nonporous substrate, such as plastic, to detect and quantify antibodies, e.g. in serum, that bind specifically to the immobilized protein of the present invention. Such plastics include polymethylacrylic, polyethylene, polypropylene, polyacrylate, polymethylmethacrylate, polyvinylchloride, polytetrafluoroethylene, polystyrene, polycarbonate, polyacetal, polysulfone, celluloseacetate, cellulosenitrate, nitrocellulose, or mixtures thereof; when the assay is performed in standard microtiter dish, the plastic is typically polystyrene.

[0494] The proteins, fragments, and fusions of the present invention can also be attached to a substrate suitable for use as a surface enhanced laser desorption ionization source; so attached, the protein, fragment, or fusion of the present invention is useful for binding and then detecting secondary proteins that bind with sufficient affinity or avidity to the surface-bound protein to indicate biologic interaction therebetween. The proteins, fragments, and fusions of the present invention can also be attached to a substrate suitable for use in surface plasmon resonance detection; so attached, the protein, fragment, or fusion of the present invention is useful for binding and then detecting secondary proteins that bind with sufficient affinity or avidity to the surface-bound protein to indicate biological interaction therebetween.

[0495] MDZ3 Proteins

[0496] In a first series of protein embodiments, the invention provides an isolated MDZ3 polypeptide having an amino acid sequence encoded by the cDNA in ATCC Deposit No. ______, or the amino acid sequence in SEQ ID NO: 3, which are full length MDZ3 proteins. When used as immunogens, the full length proteins of the present invention can be used, inter alia, to elicit antibodies that bind to a variety of epitopes of the MDZ3 protein.

[0497] The invention further provides fragments of the above-described polypeptides, particularly fragments having at least 6 amino acids, typically at least 8 amino acids, often at least 15 amino acids, and even the entirety of the sequence given in SEQ ID NO: 3.

[0498] The invention further provides fragments of at least 6 amino acids, typically at least 8 amino acids, often at least 15 amino acids, and even the entirety of the sequence given in SEQ ID NO: 7.

[0499] As described above, the invention further provides proteins that differ in sequence from those described with particularity in the above-referenced SEQ ID NOs, whether by way of insertion or deletion, by way of conservative or moderately conservative substitutions, as hybridization related proteins, or as cross-hybridizing proteins.

[0500] Particularly useful among the above-described proteins are those having at least one C2H2 (Kruppel family) zinc finger, and especially those that have a plurality of C2H2 zinc fingers in tandem, particularly those that have 7 tandem C2H2 zinc fingers. Also particularly useful among the above-described fragments are those having a SCAN domain, those that encode a KRAB domain, and those that include all of a SCAN domain, KRAB domain, and 7 zinc fingers.

[0501] Also particularly useful are those proteins that have sequence-specific nucleic acid binding regulatory activity, and that participates in protein-protein interactions with other transcription modulators.

[0502] The invention further provides fusions of the proteins and protein fragments herein described to heterologous polypeptides.

[0503] MDZ4 Proteins

[0504] In a first series of protein embodiments, the invention provides an isolated MDZ4 polypeptide having an amino acid sequence encoded by the cDNA in ATCC Deposit No. ______, or the amino acid sequence in SEQ ID NO: 3029, which are full length MDZ4 proteins. When used as immunogens, the full length proteins of the present invention can be used, inter alla, to elicit antibodies that bind to a variety of epitopes of the MDZ4 protein.

[0505] The invention further provides fragments of the above-described polypeptides, particularly fragments having at least 6 amino acids, typically at least 8 amino acids, often at least 15 amino acids, and even the entirety of the sequence given in SEQ ID NO: 3029.

[0506] The invention further provides fragments of at least 6 amino acids, typically at least 8 amino acids, often at least 15 amino acids, and even the entirety of the sequence given in SEQ ID Nos: 3033 and 3037.

[0507] As described above, the invention further provides proteins that differ in sequence from those described with particularity in the above-referenced SEQ ID NOs., whether by way of insertion or deletion, by way of conservative or moderately conservative substitutions, as hybridization related proteins, or as cross-hybridizing proteins.

[0508] Particularly useful among such proteins are those that have at least one C2H2 (Kruppel family) zinc finger, and especially those that have 5 C2H2 zinc fingers in tandem, those that have a SCAN domain, and those that include all of a SCAN domain and 5 zinc fingers.

[0509] Also particularly useful among the above-described MDZ4 proteins are those that have sequence-specific nucleic acid binding regulatory activity, and that participate in protein-protein interactions with other transcription modulators.

[0510] The invention further provides fusions of the proteins and protein fragments herein described to heterologous polypeptides.

[0511] MDZ7 Proteins

[0512] In a first series of protein embodiments, the invention provides an isolated MDZ7 polypeptide having an amino acid sequence encoded by the cDNA in ATCC Deposit No. ______, or the amino acid sequence in SEQ ID NO: 4409, which are full length MDZ7 proteins. When used as immunogens, the full length proteins of the present invention can be used, inter alia, to elicit antibodies that bind to a variety of epitopes of the MDZ7 protein.

[0513] The invention further provides fragments of the above-described polypeptides, particularly fragments having at least 6 amino acids, typically at least 8 amino acids, often at least 15 amino acids, and even the entirety of the sequence given in SEQ ID NO: 4409.

[0514] As described above, the invention further provides proteins that differ in sequence from those described with particularity in the above-referenced SEQ ID NOs, whether by way of insertion or deletion, by way of conservative or moderately conservative substitutions, as hybridization related proteins, or as cross-hybridizing proteins, with those that substantially retain a MDZ7 activity particularly useful.

[0515] Particularly useful among the above-described MDZ7 proteins are those that have at least one C2H2 (Kruppel family) zinc finger, especially those having a plurality of zinc fingers in tandem, particularly those having 7 zinc fingers in tandem.

[0516] Also particularly useful among the above-described MDZ7 proteins are those that have sequence-specific nucleic acid binding regulatory activity, and that function in sequence-specific modulation of gene expression.

[0517] The invention further provides fusions of the proteins and protein fragments herein described to heterologous polypeptides.

[0518] MDZ12 Proteins

[0519] In a first series of protein embodiments, the invention provides an isolated MDZ12a polypeptide having an amino acid sequence encoded by the cDNA in ATCC Deposit No. ______, or the amino acid sequence in SEQ ID NO: 5772, which are full length MDZ12a proteins. When used as immunogens, the full length proteins of the present invention can be used, inter alia, to elicit antibodies that bind to a variety of epitopes of the MDZ12a protein.

[0520] The invention further provides fragments of the above-described polypeptides, particularly fragments having at least 6 amino acids, typically at least 8 amino acids, often at least 15 amino acids, and even the entirety of the sequence given in SEQ ID NO: 5772.

[0521] The invention further provides fragments of at least 6 amino acids, typically at least 8 amino acids, often at least 15 amino acids, and even the entirety of the sequence given in SEQ ID NO: 5774.

[0522] In another series of protein embodiments, the invention provides an isolated MDZ12bS polypeptide having an amino acid sequence encoded by the MDZ12bS part of the MDZ12b cDNA in ATCC Deposit No. ______, or the amino acid sequence in SEQ ID NO: 6939, a full length MDZ12bS protein. When used as immunogens, the full length proteins of the present invention can be used, inter alia, to elicit antibodies that bind to a variety of epitopes of the MDZ12bS protein.

[0523] The invention further provides fragments of the above-described polypeptides, particularly fragments having at least 6 amino acids, typically at least 8 amino acids, often at least 15 amino acids, and even the entirety of the sequence given in SEQ ID NO: 6939.

[0524] In another series of protein embodiments, the invention provides an isolated MDZ12bL polypeptide having an amino acid sequence encoded by the MDZ12bL portion of the MDZ12b cDNA in ATCC Deposit No. ______, or the amino acid sequence in SEQ ID NO: 6940, which is a full length MDZ12bL protein. When used as immunogens, the full length proteins of the present invention can be used, inter alia, to elicit antibodies that bind to a variety of epitopes of the MDZ12bL protein.

[0525] The invention further provides fragments of the above-described polypeptides, particularly fragments having at least 6 amino acids, typically at least 8 amino acids, often at least 15 amino acids, and even the entirety of the sequence given in SEQ ID NO: 6940.

[0526] The invention further provides fragments of at least 6 amino acids, typically at least 8 amino acids, often at least 15 amino acids, and even the entirety of the sequence given in SEQ ID NO: 6942.

[0527] As described above, the invention further provides proteins that differ in sequence from those described with particularity in the above-referenced SEQ ID NOs., whether by way of insertion or deletion, by way of conservative or moderately conservative substitutions, as hybridization related proteins, or as cross-hybridizing proteins, with those that substantially retain a MDZ12 activity particularly useful.

[0528] Particularly useful among the above-described MDZ12 proteins are those that have a C2H2 (Kruppel family) zinc finger, particularly those having a plurality of such zinc fingers in tandem, especially those having at least 5, often at least 12, zinc fingers in tandem. Also particularly useful among the above-described proteins are those that have a KRAB-B domain, especially those having both a KRAB domain and at least one, preferably a plurality, especially at least 10, often at least 12, zinc finger domains.

[0529] Particularly useful proteins are those that act as sequence-specific transcription regulators, and that interaction with other transcriptional modulators by protein-protein interactions.

[0530] The invention further provides fusions of the proteins and protein fragments herein described to heterologous polypeptides.

[0531] Antibodies and Antibody-Producing Cells

[0532] In another aspect, the invention provides antibodies, including fragments and derivatives thereof, that bind specifically to MDZ3, MDZ4, MDZ7 or MDZ12 proteins and protein fragments of the present invention or to one or more of the proteins and protein fragments encoded by the isolated MDZ3, MDZ4, MDZ7 or MDZ12 nucleic acids of the present invention. The antibodies of the present invention can be specific for all of linear epitopes, discontinuous epitopes, or conformational epitopes of such proteins or protein fragments, either as present on the protein in its native conformation or, in some cases, as present on the proteins as denatured, as, e.g., by solubilization in SDS.

[0533] In other embodiments, the invention provides antibodies, including fragments and derivatives thereof, the binding of which can be competitively inhibited by one or more of the MDZ3, MDZ4, MDZ7 or MDZ12 proteins and protein fragments of the present invention, or by one or more of the proteins and protein fragments encoded by the isolated MDZ3, MDZ4, MDZ7 or MDZ12 nucleic acids of the present invention.

[0534] As used herein, the term “antibody” refers to a polypeptide, at least a portion of which is encoded by at least one immunoglobulin gene, which can bind specifically to a first molecular species, and to fragments or derivatives thereof that remain capable of such specific binding.

[0535] By “bind specifically” and “specific binding” is here intended the ability of the antibody to bind to a first molecular species in preference to binding to other molecular species with which the antibody and first molecular species are admixed. An antibody is said specifically to “recognize” a first molecular species when it can bind specifically to that first molecular species.

[0536] As is well known in the art, the degree to which an antibody can discriminate as among molecular species in a mixture will depend, in part, upon the conformational relatedness of the species in the mixture; typically, the antibodies of the present invention will discriminate over adventitious binding to non-MDZ3, non-MDZ4, non-MDZ7 or non-MDZ12 proteins by at least two-fold, more typically by at least 5-fold, typically by more than 10-fold, 25-fold, 50-fold, 75-fold, and often by more than 100-fold, and on occasion by more than 500-fold or 1000-fold. When used to detect the proteins or protein fragments of the present invention, the antibody of the present invention is sufficiently specific when it can be used to determine the presence of the protein of the present invention in samples derived from human tissues expressing each of the genes (see, e.g., Examples 1, 2, 3, and 4).

[0537] Typically, the affinity or avidity of an antibody (or antibody multimer, as in the case of an IgM pentamer) of the present invention for a protein or protein fragment of the present invention will be at least about 1×10⁻⁶ molar (M), typically at least about 5×10⁻⁷ M, usefully at least about 1×10⁻⁷ M, with affinities and avidities of at least 1×10⁻⁸ M, 5×10⁻⁹ M, and 1×10⁻¹⁰ M proving especially useful.

[0538] The antibodies of the present invention can be naturally-occurring forms, such as IgG, IgM, IgD, IgE, and IgA, from any mammalian species.

[0539] Human antibodies can, but will infrequently, be drawn directly from human donors or human cells. In such case, antibodies to the proteins of the present invention will typically have resulted from fortuitous immunization, such as autoimmune immunization, with the protein or protein fragments of the present invention. Such antibodies will typically, but will not invariably, be polyclonal.

[0540] Human antibodies are more frequently obtained using transgenic animals that express human immunoglobulin genes, which transgenic animals can be affirmatively immunized with the protein immunogen of the present invention. Human Ig-transgenic mice capable of producing human antibodies and methods of producing human antibodies therefrom upon specific immunization are described, inter alia, in U.S. Pat. Nos. 6,162,963; 6,150,584; 6,114,598; 6,075,181; 5,939,598; 5,877,397; 5,874,299; 5,814,318; 5,789,650; 5,770,429; 5,661,016; 5,633,425; 5,625,126; 5,569,825; 5,545,807; 5,545,806, and 5,591,669, the disclosures of which are incorporated herein by reference in their entireties. Such antibodies are typically monoclonal, and are typically produced using techniques developed for production of murine antibodies.

[0541] Human antibodies are particularly useful, and often preferred, when the antibodies of the present invention are to be administered to human beings as in vivo diagnostic or therapeutic agents, since recipient immune response to the administered antibody will often be substantially less than that occasioned by administration of an antibody derived from another species, such as mouse.

[0542] IgG, IgM, IgD, IgE and IgA antibodies of the present invention are also usefully obtained from other mammalian species, including rodents—typically mouse, but also rat, guinea pig, and hamster—lagomorphs, typically rabbits, and also larger mammals, such as sheep, goats, cows, and horses. In such cases, as with the transgenic human-antibody-producing non-human mammals, fortuitous immunization is not required, and the non-human mammal is typically affirmatively immunized, according to standard immunization protocols, with the protein or protein fragment of the present invention.

[0543] As discussed above, virtually all fragments of 8 or more contiguous amino acids of the proteins of the present invention can be used effectively as immunogens when conjugated to a carrier, typically a protein such as bovine thyroglobulin, keyhole limpet hemocyanin, or bovine serum albumin, conveniently using a bifunctional linker such as those described elsewhere above, which discussion is incorporated by reference here.

[0544] Immunogenicity can also be conferred by fusion of the proteins and protein fragments of the present invention to other moieties.

[0545] For example, peptides of the present invention can be produced by solid phase synthesis on a branched polylysine core matrix; these multiple antigenic peptides (MAPs) provide high purity, increased avidity, accurate chemical definition and improved safety in vaccine development. Tam et al., Proc. Natl. Acad. Sci. USA 85:5409-5413 (1988); Posnett et al., J. Biol. Chem. 263, 1719-1725 (1988).

[0546] Protocols for immunizing non-human mammals are well-established in the art, Harlow et al. (eds.), Antibodies: A Laboratory Manual, Cold Spring Harbor Laboratory (1998) (ISBN: 0879693142); Coligan et al. (eds.), Current Protocols in Immunology, John Wiley & Sons, Inc. (2001) (ISBN: 0-471-52276-7); Zola, Monoclonal Antibodies: Preparation and Use of Monoclonal Antibodies and Engineered Antibody Derivatives (Basics: From Background to Bench), Springer Verlag (2000) (ISBN: 0387915907), the disclosures of which are incorporated herein by reference, and often include multiple immunizations, either with or without adjuvants such as Freund's complete adjuvant and Freund's incomplete adjuvant.

[0547] Antibodies from nonhuman mammals can be polyclonal or monoclonal, with polyclonal antibodies having certain advantages in immunohistochemical detection of the proteins of the present invention and monoclonal antibodies having advantages in identifying and distinguishing particular epitopes of the proteins of the present invention.

[0548] Following immunization, the antibodies of the present invention can be produced using any art-accepted technique. Such techniques are well known in the art, Coligan et al. (eds.), Current Protocols in Immunology, John Wiley & Sons, Inc. (2001) (ISBN: 0-471-52276-7); Zola, Monoclonal Antibodies: Preparation and Use of Monoclonal Antibodies and Engineered Antibody Derivatives (Basics: From Background to Bench), Springer Verlag (2000) (ISBN: 0387915907); Howard et al. (eds.), Basic Methods in Antibody Production and Characterization, CRC Press (2000) (ISBN: 0849394457); Harlow et al. (eds.), Antibodies: A Laboratory Manual, Cold Spring Harbor Laboratory (1998) (ISBN: 0879693142); Davis (ed.), Monoclonal Antibody Protocols, Vol. 45, Humana Press (1995) (ISBN: 0896033082); Delves (ed.), Antibody Production: Essential Techniques, John Wiley & Son Ltd (1997) (ISBN: 0471970107); Kenney, Antibody Solution: An Antibody Methods Manual, Chapman & Hall (1997) (ISBN: 0412141914), incorporated herein by reference in their entireties, and thus need not be detailed here.

[0549] Briefly, however, such techniques include, inter alia, production of monoclonal antibodies by hybridomas and expression of antibodies or fragments or derivatives thereof from host cells engineered to express immunoglobulin genes or fragments thereof. These two methods of production are not mutually exclusive: genes encoding antibodies specific for the proteins or protein fragments of the present invention can be cloned from hybridomas and thereafter expressed in other host cells. Nor need the two necessarily be performed together: e.g., genes encoding antibodies specific for the proteins and protein fragments of the present invention can be cloned directly from B cells known to be specific for the desired protein, as further described in U.S. Pat. No. 5,627,052, the disclosure of which is incorporated herein by reference in its entirety, or from antibody-displaying phage.

[0550] Recombinant expression in host cells is particularly useful when fragments or derivatives of the antibodies of the present invention are desired.

[0551] Host cells for recombinant antibody production—either whole antibodies, antibody fragments, or antibody derivatives—can be prokaryotic or eukaryotic.

[0552] Prokaryotic hosts are particularly useful for producing phage displayed antibodies of the present invention.

[0553] The technology of phage-displayed antibodies, in which antibody variable region fragments are fused, for example, to the gene III protein (pIII) or gene VIII protein (pVIII) for display on the surface of filamentous phage, such as M13, is by now well-established, Sidhu, Curr. Opin. Biotechnol. 11(6):610-6 (2000); Griffiths et al., Curr. Opin. Biotechnol. 9(1):102-8 (1998); Hoogenboom et al., Immunotechnology, 4(1):1-20 (1998); Rader et al., Current Opinion in Biotechnology 8:503-508 (1997); Aujame et al., Human Antibodies 8:155-168 (1997); Hoogenboom, Trends in Biotechnol. 15:62-70 (1997); de Kruif et al., 17:453-455 (1996); Barbas et al., Trends in Biotechnol. 14:230-234 (1996); Winter et al., Ann. Rev. Immunol. 433-455 (1994), and techniques and protocols required to generate, propagate, screen (pan), and use the antibody fragments from such libraries have recently been compiled, Barbas et al., Phage Display: A Laboratory Manual, Cold Spring Harbor Laboratory Press (2001) (ISBN 0-87969-546-3); Kay et al. (eds.), Phage Display of Peptides and Proteins: A Laboratory Manual, Academic Press, Inc. (1996); Abelson et al. (eds.), Combinatorial Chemistry, Methods in Enzymology vol. 267, Academic Press (May 1996), the disclosures of which are incorporated herein by reference in their entireties.

[0554] Typically, phage-displayed antibody fragments are scFv fragments or Fab fragments; when desired, full length antibodies can be produced by cloning the variable regions from the displaying phage into a complete antibody and expressing the full length antibody in a further prokaryotic or a eukaryotic host cell.

[0555] Eukaryotic cells are also useful for expression of the antibodies, antibody fragments, and antibody derivatives of the present invention.

[0556] For example, antibody fragments of the present invention can be produced in Pichia pastoris, Takahashi et al., Biosci. Biotechnol. Biochem. 64(10):2138-44 (2000); Freyre et al., J. Biotechnol. 76(2-3):157-63 (2000); Fischer et al., Biotechnol. Appl. Biochem. 30 (Pt 2):117-20 (1999); Pennell et al., Res. Immunol. 149(6):599-603 (1998); Eldin et al., J. Immunol. Methods. 201(1):67-75 (1997); and in Saccharomyces cerevisiae, Frenken et al., Res. Immunol. 149(6):589-99 (1998); Shusta et al., Nature Biotechnol. 16(8):773-7 (1998), the disclosures of which are incorporated herein by reference in their entireties.

[0557] Antibodies, including antibody fragments and derivatives, of the present invention can also be produced in insect cells, Li et al., Protein Expr. Purif. 21(1):121-8 (2001); Ailor et al., Biotechnol. Bioeng. 58(2-3):196-203 (1998); Hsu et al., Biotechnol. Prog. 13(1):96-104 (1997); Edelman et al., Immunology 91(1):13-9 (1997); and Nesbit et al., J. Immunol. Methods. 151(1-2):201-8 (1992), the disclosures of which are incorporated herein by reference in their entireties.

[0558] Antibodies and fragments and derivatives thereof of the present invention can also be produced in plant cells, Giddings et al., Nature Biotechnol. 18(11):1151-5 (2000); Gavilondo et al., Biotechniques 29(1):128-38 (2000); Fischer et al., J. Biol. Regul. Homeost. Agents 14(2):83-92 (2000); Fischer et al., Biotechnol. Appl. Biochem. 30 (Pt 2):113-6 (1999); Fischer et al., Biol. Chem. 380(7-8):825-39 (1999); Russell, Curr. Top. Microbiol. Immunol. 240:119-38 (1999); and Ma et al., Plant Physiol. 109(2):341-6 (1995), the disclosures of which are incorporated herein by reference in their entireties.

[0559] Mammalian cells useful for recombinant expression of antibodies, antibody fragments, and antibody derivatives of the present invention include CHO cells, COS cells, 293 cells, and myeloma cells.

[0560] Verma et al., J. Immunol. Methods 216(1-2):165-81 (1998), review and compare bacterial, yeast, insect and mammalian expression systems for expression of antibodies.

[0561] Antibodies of the present invention can also be prepared by cell free translation, as further described in Merk et al., J. Biochem. (Tokyo). 125(2):328-33 (1999) and Ryabova et al., Nature Biotechnol. 15(1):79-84 (1997), and in the milk of transgenic animals, as further described in Pollock et al., J. Immunol. Methods 231(1-2):147-57 (1999), the disclosures of which are incorporated herein by reference in their entireties.

[0562] The invention further provides antibody fragments that bind specifically to one or more of the proteins and protein fragments of the present invention, to one or more of the proteins and protein fragments encoded by the isolated nucleic acids of the present invention, or the binding of which can be competitively inhibited by one or more of the proteins and protein fragments of the present invention or one or more of the proteins and protein fragments encoded by the isolated nucleic acids of the present invention.

[0563] Among such useful fragments are Fab, Fab′, Fv, F(ab)′₂, and single chain Fv (scFv) fragments. Other useful fragments are described in Hudson, Curr. Opin. Biotechnol. 9(4) :395-402 (1998).

[0564] It is also an aspect of the present invention to provide antibody derivatives that bind specifically to one or more of the proteins and protein fragments of the present invention, to one or more of the proteins and protein fragments encoded by the isolated nucleic acids of the present invention, or the binding of which can be competitively inhibited by one or more of the proteins and protein fragments of the present invention or one or more of the proteins and protein fragments encoded by the isolated nucleic acids of the present invention.

[0565] Among such useful derivatives are chimeric, primatized, and humanized antibodies; such derivatives are less immunogenic in human beings, and thus more suitable for in vivo administration, than are unmodified antibodies from non-human mammalian species.

[0566] Chimeric antibodies typically include heavy and/or light chain variable regions (including both CDR and framework residues) of immunoglobulins of one species, typically mouse, fused to constant regions of another species, typically human. See, e.g., U.S. Pat. No. 5,807,715; Morrison et al., Proc. Natl. Acad. Sci USA.81(21):6851-5 (1984); Sharon et al., Nature 309(5966):364-7 (1984); Takeda et al., Nature 314(6010):452-4 (1985), the disclosures of which are incorporated herein by reference in their entireties. Primatized and humanized antibodies typically include heavy and/or light chain CDRs from a murine antibody grafted into a non-human primate or human antibody V region framework, usually further comprising a human constant region, Riechmann et al., Nature 332(6162):323-7 (1988); Co et al., Nature 351(6326):501-2 (1991); U.S. Pat. Nos. 6,054,297; 5,821,337; 5,770,196; 5,766,886; 5,821,123; 5,869,619; 6,180,377; 6,013,256; 5,693,761; and 6,180,370, the disclosures of which are incorporated herein by reference in their entireties.

[0567] Other useful antibody derivatives of the invention include heteromeric antibody complexes and antibody fusions, such as diabodies (bispecific antibodies), single-chain diabodies, and intrabodies.

[0568] The antibodies of the present invention, including fragments and derivatives thereof, can usefully be labeled. It is, therefore, another aspect of the present invention to provide labeled antibodies that bind specifically to one or more of the proteins and protein fragments of the present invention, to one or more of the proteins and protein fragments encoded by the isolated nucleic acids of the present invention, or the binding of which can be competitively inhibited by one or more of the proteins and protein fragments of the present invention or one or more of the proteins and protein fragments encoded by the isolated nucleic acids of the present invention.

[0569] The choice of label depends, in part, upon the desired use.

[0570] For example, when the antibodies of the present invention are used for immunohistochemical staining of tissue samples, the label can usefully be an enzyme that catalyzes production and local deposition of a detectable product.

[0571] Enzymes typically conjugated to antibodies to permit their immunohistochemical visualization are well known, and include alkaline phosphatase, β-galactosidase, glucose oxidase, horseradish peroxidase (HRP), and urease. Typical substrates for production and deposition of visually detectable products include o-nitrophenyl-beta-D-galactopyranoside (ONPG); o-phenylenediamine dihydrochloride (OPD); p-nitrophenyl phosphate (PNPP); p-nitrophenyl-beta-D-galactopryanoside (PNPG); 3′,3′-diaminobenzidine (DAB); 3-amino-9-ethylcarbazole (AEC); 4-chloro-1-naphthol (CN); 5-bromo-4-chloro-3-indolyl-phosphate (BCIP); ABTS®; BluoGal; iodonitrotetrazolium (INT); nitroblue tetrazolium chloride (NBT); phenazine methosulfate (PMS); phenolphthalein monophosphate (PMP); tetramethyl benzidine (TMB); tetranitroblue tetrazolium (TNBT); X-Gal; X-Gluc; and X-Glucoside.

[0572] Other substrates can be used to produce products for local deposition that are luminescent. For example, in the presence of hydrogen peroxide (H₂O₂), horseradish peroxidase (HRP) can catalyze the oxidation of cyclic diacylhydrazides, such as luminol. Immediately following the oxidation, the luminol is in an excited state (intermediate reaction product), which decays to the ground state by emitting light. Strong enhancement of the light emission is produced by enhancers, such as phenolic compounds. Advantages include high sensitivity, high resolution, and rapid detection without radioactivity and requiring only small amounts of antibody. See, e.g., Thorpe et al., Methods Enzymol. 133:331-53 (1986); Kricka et al., J. Immunoassay 17(1):67-83 (1996); and Lundqvist et al., J. Biolumin. Chemilumin. 10(6):353-9 (1995), the disclosures of which are incorporated herein by reference in their entireties. Kits for such enhanced chemiluminescent detection (ECL) are available commercially.

[0573] The antibodies can also be labeled using colloidal gold.

[0574] As another example, when the antibodies of the present invention are used, e.g., for flow cytometric detection, for scanning laser cytometric detection, or for fluorescent immunoassay, they can usefully be labeled with fluorophores.

[0575] There are a wide variety of fluorophore labels that can usefully be attached to the antibodies of the present invention.

[0576] For flow cytometric applications, both for extracellular detection and for intracellular detection, common useful fluorophores can be fluorescein isothiocyanate (FITC), allophycocyanin (APC), R-phycoerythrin (PE), peridinin chlorophyll protein (PerCP), Texas Red, Cy3, Cy5, fluorescence resonance energy tandem fluorophores such as PerCP-Cy5.5, PE-Cy5, PE-Cy5.5, PE-Cy7, PE-Texas Red, and APC-Cy7.

[0577] Other fluorophores include, inter alia, Alexa Fluor® 350, Alexa Fluor® 488, Alexa Fluor® 532, Alexa Fluor® 546, Alexa Fluor® 568, Alexa Fluor® 594, Alexa Fluor® 647 (monoclonal antibody labeling kits available from Molecular Probes, Inc., Eugene, Oreg., USA), BODIPY dyes, such as BODIPY 493/503, BODIPY FL, BODIPY R6G, BODIPY 530/550, BODIPY TMR, BODIPY 558/568, BODIPY 558/568, BODIPY 564/570, BODIPY 576/589, BODIPY 581/591, BODIPY TR, BODIPY 630/650, BODIPY 650/665, Cascade Blue, Cascade Yellow, Dansyl, lissamine rhodamine B, Marina Blue, Oregon Green 488, Oregon Green 514, Pacific Blue, rhodamine 6G, rhodamine green, rhodamine red, tetramethylrhodamine, Texas Red (available from Molecular Probes, Inc., Eugene, Oreg., USA), and Cy2, Cy3, Cy3.5, Cy5, Cy5.5, Cy7, all of which are also useful for fluorescently labeling the antibodies of the present invention.

[0578] For secondary detection using labeled avidin, streptavidin, captavidin or neutravidin, the antibodies of the present invention can usefully be labeled with biotin.

[0579] When the antibodies of the present invention are used, e.g., for western blotting applications, they can usefully be labeled with radioisotopes, such as ³³P, ³²P, ³⁵S, ³H, and ¹²⁵I.

[0580] As another example, when the antibodies of the present invention are used for radioimmunotherapy, the label can usefully be ²²⁸Th, ²²⁷Ac, ²²⁵Ac, ²²³Ra, ²¹³Bi, ²¹²Pb, ²¹²Bi, ²¹¹At, ²⁰³Pb, ¹⁹⁴Os, ¹⁸⁸Re, ¹⁸⁶Re, ¹⁵³Sm, ¹⁴⁹Tb, ¹³¹I, ¹²⁵I, ¹¹¹In, ¹⁰⁵Rh, ^{99m}Tc, ⁹⁷Ru, ⁹⁰Y, ⁹⁰Sr, ⁸⁸Y, ⁷²Se, ⁶⁷Cu, or ⁴⁷Sc.

[0581] As another example, when the antibodies of the present invention are to be used for in vivo diagnostic use, they can be rendered detectable by conjugation to MRI contrast agents, such as gadolinium diethylenetriaminepentaacetic acid (DTPA), Lauffer et al., Radiology 207(2):529-38 (1998), or by radioisotopic labeling As would be understood, use of the labels described above is not restricted to the application as for which they were mentioned.

[0582] The antibodies of the present invention, including fragments and derivatives thereof, can also be conjugated to toxins, in order to target the toxin's ablative action to cells that display and/or express the proteins of the present invention. Commonly, the antibody in such immunotoxins is conjugated to Pseudomonas exotoxin A, diphtheria toxin, shiga toxin A, anthrax toxin lethal factor, or ricin. See Hall (ed.), Immunotoxin Methods and Protocols (Methods in Molecular Biology, Vol 166), Humana Press (2000) (ISBN:0896037754); and Frankel et al. (eds.), Clinical Applications of Immunotoxins, Springer-Verlag New York, Incorporated (1998) (ISBN:3540640975), the disclosures of which are incorporated herein by reference in their entireties, for review.

[0583] The antibodies of the present invention can usefully be attached to a substrate, and it is, therefore, another aspect of the invention to provide antibodies that bind specifically to one or more of the proteins and protein fragments of the present invention, to one or more of the proteins and protein fragments encoded by the isolated nucleic acids of the present invention, or the binding of which can be competitively inhibited by one or more of the proteins and protein fragments of the present invention or one or more of the proteins and protein fragments encoded by the isolated nucleic acids of the present invention, attached to a substrate.

[0584] Substrates can be porous or nonporous, planar or nonplanar.

[0585] For example, the antibodies of the present invention can usefully be conjugated to filtration media, such as NHS-activated Sepharose or CNBr-activated Sepharose for purposes of immunoaffinity chromatography.

[0586] For example, the antibodies of the present invention can usefully be attached to paramagnetic microspheres, typically by biotin-streptavidin interaction, which microsphere can then be used for isolation of cells that express or display the proteins of the present invention. As another example, the antibodies of the present invention can usefully be attached to the surface of a microtiter plate for ELISA.

[0587] As noted above, the antibodies of the present invention can be produced in prokaryotic and eukaryotic cells. It is, therefore, another aspect of the present invention to provide cells that express the antibodies of the present invention, including hybridoma cells, B cells, plasma cells, and host cells recombinantly modified to express the antibodies of the present invention.

[0588] In yet a further aspect, the present invention provides aptamers evolved to bind specifically to one or more of the proteins and protein fragments of the present invention, to one or more of the proteins and protein fragments encoded by the isolated nucleic acids of the present invention, or the binding of which can be competitively inhibited by one or more of the proteins and protein fragments of the present invention or one or more of the proteins and protein fragments encoded by the isolated nucleic acids of the present invention.

[0589] MDZ3 Antibodies

[0590] In a first series of antibody embodiments, the invention provides antibodies, both polyclonal and monoclonal, and fragments and derivatives thereof, that bind specifically to, or the binding of which can be competitively inhibited by, a polypeptide having an amino acid sequence encoded by the MDZ3 cDNA in ATCC Deposit No. ______, or having the amino acid sequence of SEQ ID No: 3.

[0591] In a second series of antibody embodiments, the invention provides antibodies, both polyclonal and monoclonal, and fragments and derivatives thereof, that bind specifically to, or the binding of which can be competitively inhibited by, a polypeptide having the amino acid sequence of SEQ ID NO:7.

[0592] In a third series of antibody embodiments, the invention provides antibodies, both polyclonal and monoclonal, and fragments and derivatives thereof, that bind specifically to, or the binding of which can be competitively inhibited by, polypeptides encoded by any of the MDZ3 nucleic acids of the present invention, as above-described.

[0593] Such antibodies are useful in in vitro immunoassays, such as ELISA, western blot or immunohistochemical assay, for detection of MDZ3 and related proteins. Such antibodies are also useful in isolating and purifying MDZ3 proteins, including related cross-reactive proteins, by immunoprecipitation, immunoaffinity chromatography, or magnetic bead-mediated purification.

[0594] In other embodiments, the invention further provides the above-described antibodies detectably labeled, and in yet other embodiments, provides the above-described antibodies attached to a substrate.

[0595] MDZ4 Antibodies

[0596] In a first series of antibody embodiments, the invention provides antibodies, both polyclonal and monoclonal, and fragments and derivatives thereof, that bind specifically to, or the binding of which can be competitively inhibited by, a polypeptide having an amino acid sequence encoded by the MDZ4 cDNA in ATCC Deposit No. ______, or having the amino acid sequence of SEQ ID No: 3029.

[0597] In a second series of antibody embodiments, the invention provides antibodies, both polyclonal and monoclonal, and fragments and derivatives thereof, that bind specifically to, or the binding of which can be competitively inhibited by, a polypeptide having the amino acid sequence of SEQ ID NO:3033.

[0598] In a third series of antibody embodiments, the invention provides antibodies, both polyclonal and monoclonal, and fragments and derivatives thereof, that bind specifically to, or the binding of which can be competitively inhibited by, a polypeptide having the amino acid sequence of SEQ ID NO:3037.

[0599] In a fourth series of antibody embodiments, the invention provides antibodies, both polyclonal and monoclonal, and fragments and derivatives thereof, that bind specifically to, or the binding of which can be competitively inhibited by, polypeptides encoded by any of the MDZ7 nucleic acids of the present invention, as above-described.

[0600] Such antibodies are useful in in vitro immunoassays, such as ELISA, western blot or immunohistochemical assay, for detection of MDZ3 and related proteins. Such antibodies are also useful in isolating and purifying MDZ4 proteins, including related cross-reactive proteins, by immunoprecipitation, immunoaffinity chromatography, or magnetic bead-mediated purification.

[0601] In other embodiments, the invention further provides the above-described antibodies detectably labeled, and in yet other embodiments, provides the above-described antibodies attached to a substrate.

[0602] MDZ7 Antibodies

[0603] In a first series of antibody embodiments of this aspect of the invention, the invention provides antibodies, both polyclonal and monoclonal, and fragments and derivatives thereof, that bind specifically to, or the binding of which can be competitively inhibited by, a polypeptide having an amino acid sequence encoded by the MDZ7 cDNA in ATCC Deposit No. ______, or having the amino acid sequence of SEQ ID No: 4409.

[0604] Such antibodies are useful in in vitro immunoassays, such as ELISA, western blot or immunohistochemical assay, for detection of MDZ7 and related proteins. Such antibodies are also useful in isolating and purifying MDZ7 proteins, including related cross-reactive proteins, by immunoprecipitation, immunoaffinity chromatography, or magnetic bead-mediated purification.

[0605] In other embodiments, the invention further provides the above-described antibodies detectably labeled, and in yet other embodiments, provides the above-described antibodies attached to a substrate.

[0606] MDZ12a, MDZ12bS and MDZ12bL Antibodies

[0607] The invention further provides antibodies, polyclonal or monoclonal, and fragments and derivatives thereof, that bind specifically to, or the binding of which can be competitively inhibited by, a polypeptide having an amino acid sequence encoded by the MDZ12a cDNA in ATCC Deposit No. ______, or having the amino acid sequence of SEQ ID No:5772. Depending upon the epitope recognized, certain of such antibodies can cross-react with MDZ12bS, others with MDZ12bL, and yet others with neither MDZ12bS or MDZ12bL. These subsets can be discriminated by screening the antibodies for ability to bind to the MDZ12bS and MDZ12bL polypeptides of the present invention, the sequences of which are set forth respectively in SEQ ID NOS: 6939 and 6940.

[0608] In another series of embodiments, the invention provides antibodies, both polyclonal and monoclonal, and fragments and derivatives thereof, that bind specifically to, or the binding of which can be competitively inhibited by, a polypeptide having the amino acid sequence of SEQ ID NO:5774.

[0609] In another series of embodiments, the invention provides antibodies, including fragments and derivatives thereof, both monoclonal and polyclonal, that bind specifically to, or the binding of which can be competitively inhibited by, a MDZ12bS polypeptide encoded by ATCC Deposit No. ______, or having the amino acid sequence of SEQ ID No:6939. Such antibodies will cross-react with MDZ12a but not with MDZ12bL.

[0610] In yet another series of embodiments, the invention provides antibodies, including fragments and derivatives thereof, monoclonal and polyclonal, that bind specifically to, or the binding of which can be competitively inhibited by, a MDZ12bL polypeptide encoded by ATCC Deposit No. ______, or having the amino acid sequence of SEQ ID No:6940. Such antibodies will cross-react with MDZ12a but not with MDZ12bS.

[0611] Such antibodies are useful in in vitro immunoassays, such as ELISA, western blot or immunohistochemical assay, for detection of MDZ7 and related proteins. Such antibodies are also useful in isolating and purifying MDZ12 proteins, including related cross-reactive proteins, by immunoprecipitation, immunoaffinity chromatography, or magnetic bead-mediated purification.

[0612] In other embodiments, the invention further provides the above-described antibodies detectably labeled, and in yet other embodiments, provides the above-described antibodies attached to a substrate.

[0613] Pharmaceutical Compositions

[0614] MDZ3, MDZ4, MDZ7 and MDZ12 are important for transcriptional regulation and protein-protein interactions with other transcription modulators; defects in MDZ3, MDZ4, MDZ7 or MDZ12 expression, activity, distribution, localization, and/or solubility are a cause of human disease, which disease can manifest as a disorder of brain, testis, heart or bone marrow function for MDZ3; bone marrow, brain, heart, hela, adult liver, fetal liver, lung, placenta or prostate function for MDZ4; testes function for MDZ7; and brain, heart, kidney, placenta, skeletal muscle, testis, bone marrow or liver function for MDZ12.

[0615] Accordingly, pharmaceutical compositions comprising nucleic acids, proteins, and antibodies of the present invention, as well as mimetics, agonists, antagonists, or inhibitors of MDZ3, MDZ4, MDZ7 or MDZ12 activity, can be administered as therapeutics for treatment of MDZ3, MDZ4, MDZ7 or MDZ12 defects, respectively.

[0616] Thus, in another aspect, the invention provides pharmaceutical compositions comprising the nucleic acids, nucleic acid fragments, proteins, protein fusions, protein fragments, antibodies, antibody derivatives, antibody fragments, mimetics, agonists, antagonists, and inhibitors of the present invention.

[0617] Such a composition typically contains from about 0.1 to 90% by weight of a therapeutic agent of the invention formulated in and/or with a pharmaceutically acceptable carrier or excipient.

[0618] Pharmaceutical formulation is a well-established art, and is further described in Gennaro (ed.), Remington: The Science and Practice of Pharmacy, 20^{th} ed., Lippincott, Williams & Wilkins (2000) (ISBN: 0683306472); Ansel et al., Pharmaceutical Dosage Forms and Drug Delivery Systems, 7^{th} ed., Lippincott Williams & Wilkins Publishers (1999) (ISBN: 0683305727); and Kibbe (ed.), Handbook of Pharmaceutical Excipients American Pharmaceutical Association, 3^{rd} ed. (2000) (ISBN: 091733096X), the disclosures of which are incorporated herein by reference in their entireties, and thus need not be described in detail herein.

[0619] Briefly, however, formulation of the pharmaceutical compositions of the present invention will depend upon the route chosen for administration. The pharmaceutical compositions utilized in this invention can be administered by various routes including both enteral and parenteral routes, including oral, intravenous, intramuscular, subcutaneous, inhalation, topical, sublingual, rectal, intra-arterial, intramedullary, intrathecal, intraventricular, transmucosal, transdermal, intranasal, intraperitoneal, intrapulmonary, and intrauterine.

[0620] Oral dosage forms can be formulated as tablets, pills, dragees, capsules, liquids, gels, syrups, slurries, suspensions, and the like, for ingestion by the patient.

[0621] Solid formulations of the compositions for oral administration can contain suitable carriers or excipients, such as carbohydrate or protein fillers, such as sugars, including lactose, sucrose, mannitol, or sorbitol; starch from corn, wheat, rice, potato, or other plants; cellulose, such as methyl cellulose, hydroxypropylmethyl-cellulose, sodium carboxymethylcellulose, or microcrystalline cellulose; gums including arabic and tragacanth; proteins such as gelatin and collagen; inorganics, such as kaolin, calcium carbonate, dicalcium phosphate, sodium chloride; and other agents such as acacia and alginic acid.

[0622] Agents that facilitate disintegration and/or solubilization can be added, such as the cross-linked polyvinyl pyrrolidone, agar, alginic acid, or a salt thereof, such as sodium alginate, microcrystalline cellulose, corn starch, sodium starch glycolate, and alginic acid.

[0623] Tablet binders that can be used include acacia, methylcellulose, sodium carboxymethylcellulose, polyvinylpyrrolidone (Povidone™), hydroxypropyl methylcellulose, sucrose, starch and ethylcellulose.

[0624] Lubricants that can be used include magnesium stearates, stearic acid, silicone fluid, talc, waxes, oils, and colloidal silica.

[0625] Fillers, agents that facilitate disintegration and/or solubilization, tablet binders and lubricants, including the aforementioned, can be used singly or in combination.

[0626] Solid oral dosage forms need not be uniform throughout.

[0627] For example, dragee cores can be used in conjunction with suitable coatings, such as concentrated sugar solutions, which can also contain gum arabic, talc, polyvinylpyrrolidone, carbopol gel, polyethylene glycol, and/or titanium dioxide, lacquer solutions, and suitable organic solvents or solvent mixtures.

[0628] Oral dosage forms of the present invention include push-fit capsules made of gelatin, as well as soft, sealed capsules made of gelatin and a coating, such as glycerol or sorbitol. Push-fit capsules can contain active ingredients mixed with a filler or binders, such as lactose or starches, lubricants, such as talc or magnesium stearate, and, optionally, stabilizers. In soft capsules, the active compounds can be dissolved or suspended in suitable liquids, such as fatty oils, liquid, or liquid polyethylene glycol with or without stabilizers.

[0629] Additionally, dyestuffs or pigments can be added to the tablets or dragee coatings for product identification or to characterize the quantity of active compound, i.e., dosage.

[0630] Liquid formulations of the pharmaceutical compositions for oral (enteral) administration are prepared in water or other aqueous vehicles and can contain various suspending agents such as methylcellulose, alginates, tragacanth, pectin, kelgin, carrageenan, acacia, polyvinylpyrrolidone, and polyvinyl alcohol. The liquid formulations can also include solutions, emulsions, syrups and elixirs containing, together with the active compound(s), wetting agents, sweeteners, and coloring and flavoring agents.

[0631] The pharmaceutical compositions of the present invention can also be formulated for parenteral administration.

[0632] For intravenous injection, water soluble versions of the compounds of the present invention are formulated in, or if provided as a lyophilate, mixed with, a physiologically acceptable fluid vehicle, such as 5% dextrose (“D5”), physiologically buffered saline, 0.9% saline, Hanks' solution, or Ringer's solution.

[0633] Intramuscular preparations, e.g. a sterile formulation of a suitable soluble salt form of the compounds of the present invention, can be dissolved and administered in a pharmaceutical excipient such as Water-for-Injection, 0.9% saline, or 5% glucose solution. Alternatively, a suitable insoluble form of the compound can be prepared and administered as a suspension in an aqueous base or a pharmaceutically acceptable oil base, such as an ester of a long chain fatty acid (e.g., ethyl oleate), fatty oils such as sesame oil, triglycerides, or liposomes.

[0634] Parenteral formulations of the compositions can contain various carriers such as vegetable oils, dimethylacetamide, dimethylformamide, ethyl lactate, ethyl carbonate, isopropyl myristate, ethanol, polyols (glycerol, propylene glycol, liquid polyethylene glycol, and the like).

[0635] Aqueous injection suspensions can also contain substances that increase the viscosity of the suspension, such as sodium carboxymethyl cellulose, sorbitol, or dextran. Non-lipid polycationic amino polymers can also be used for delivery. Optionally, the suspension can also contain suitable stabilizers or agents that increase the solubility of the compounds to allow for the preparation of highly concentrated solutions.

[0636] Pharmaceutical compositions of the present invention can also be formulated to permit injectable, long-term, deposition.

[0637] The pharmaceutical compositions of the present invention can be administered topically.

[0638] A topical semi-solid ointment formulation typically contains a concentration of the active ingredient from about 1 to 20%, e.g., 5 to 10%, in a carrier such as a pharmaceutical cream base. Various formulations for topical use include drops, tinctures, lotions, creams, solutions, and ointments containing the active ingredient and various supports and vehicles. In other transdermal formulations, typically in patch-delivered formulations, the pharmaceutically active compound is formulated with one or more skin penetrants, such as 2-N-methyl-pyrrolidone (NMP) or Azone.

[0639] Inhalation formulations can also readily be formulated. For inhalation, various powder and liquid formulations can be prepared.

[0640] The pharmaceutically active compound in the pharmaceutical compositions of the present inention can be provided as the salt of a variety of acids, including but not limited to hydrochloric, sulfuric, acetic, lactic, tartaric, malic, and succinic acid. Salts tend to be more soluble in aqueous or other protonic solvents than are the corresponding free base forms.

[0641] After pharmaceutical compositions have been prepared, they are packaged in an appropriate container and labeled for treatment of an indicated condition.

[0642] The active compound will be present in an amount effective to achieve the intended purpose. The determination of an effective dose is well within the capability of those skilled in the art.

[0643] A “therapeutically effective dose” refers to that amount of active ingredient—for example MDZ3, MDZ4, MDZ7 or MDZ12 protein, fusion protein, or fragments thereof, antibodies specific for MDZ3, MDZ4, MDZ7 or MDZ12, agonists, antagonists or inhibitors of MDZ3, MDZ4, MDZ7 or MDZ12—which ameliorates the signs or symptoms of the disease or prevents progression thereof; as would be understood in the medical arts, cure, although desired, is not required.

[0644] The therapeutically effective dose of the pharmaceutical agents of the present invention can be estimated initially by in vitro tests, such as cell culture assays, followed by assay in model animals, usually mice, rats, rabbits, dogs, or pigs. The animal model can also be used to determine an initial useful concentration range and route of administration.

[0645] For example, the ED50 (the dose therapeutically effective in 50% of the population) and LD50 (the dose lethal to 50% of the population) can be determined in one or more cell culture of animal model systems. The dose ratio of toxic to therapeutic effects is the therapeutic index, which can be expressed as LD50/ED50. Pharmaceutical compositions that exhibit large therapeutic indices are particularly useful.

[0646] The data obtained from cell culture assays and animal studies is used in formulating an initial dosage range for human use, and preferably provides a range of circulating concentrations that includes the ED50 with little or no toxicity. After administration, or between successive administrations, the circulating concentration of active agent varies within this range depending upon pharmacokinetic factors well known in the art, such as the dosage form employed, sensitivity of the patient, and the route of administration.

[0647] The exact dosage will be determined by the practitioner, in light of factors specific to the subject requiring treatment. Factors that can be taken into account by the practitioner include the severity of the disease state, general health of the subject, age, weight, gender of the subject, diet, time and frequency of administration, drug combination(s), reaction sensitivities, and tolerance/response to therapy. Long-acting pharmaceutical compositions can be administered every 3 to 4 days, every week, or once every two weeks depending on half-life and clearance rate of the particular formulation.

[0648] Normal dosage amounts may vary from 0.1 to 100,000 micrograms, up to a total dose of about 1 g, depending upon the route of administration. Where the therapeutic agent is a protein or antibody of the present invention, the therapeutic protein or antibody agent typically is administered at a daily dosage of 0.01 mg to 30 mg/kg of body weight of the patient (e.g., 1 mg/kg to 5 mg/kg). The pharmaceutical formulation can be administered in multiple doses per day, if desired, to achieve the total desired daily dose.

[0649] Guidance as to particular dosages and methods of delivery is provided in the literature and generally available to practitioners in the art. Those skilled in the art will employ different formulations for nucleotides than for proteins or their inhibitors. Similarly, delivery of polynucleotides or polypeptides will be specific to particular cells, conditions, locations, etc.

[0650] Conventional methods, known to those of ordinary skill in the art of medicine, can be used to administer the pharmaceutical formulation (s) of the present invention to the patient. The pharmaceutical compositions of the present invention can be administered alone, or in combination with other therapeutic agents or interventions.

[0651] Therapeutic Methods

[0652] The present invention further provides methods of treating subjects having defects in MDZ3, MDZ4, MDZ7 or MDZ12—e.g., in expression, activity, distribution, localization, and/or solubility of MDZ3, MDZ4, MDZ7 or MDZ12—which can manifest as a disorder of brain, testis, heart or bone marrow function for MDZ3; bone marrow, brain, heart, hela, adult liver, fetal liver, lung, placenta and prostate function for MDZ4; testes function for MDZ7; and brain, heart, kidney, placenta, skeletal muscle, testis, bone marrow or liver function for MDZ12. As used herein, “treating” includes all medically-acceptable types of therapeutic intervention, including palliation and prophylaxis (prevention) of disease.

[0653] In one embodiment of the therapeutic methods of the present invention, a therapeutically effective amount of a pharmaceutical composition comprising MDZ3, MDZ4, MDZ7 or MDZ12 protein, fusion, fragment or derivative thereof is administered to a subject with a clinically-significant MDZ3, MDZ4, MDZ7 or MDZ12 defect.

[0654] Protein compositions are administered, for example, to complement a deficiency in native MDZ3, MDZ4, MDZ7 or MDZ12, respectively. In other embodiments, protein compositions are administered as a vaccine to elicit a humoral and/or cellular immune response to MDZ3, MDZ4, MDZ7 or MDZ12, respectively. The immune response can be used to modulate activity of MDZ3, MDZ4, MDZ7 or MDZ12, respectively, or, depending on the immunogen, to immunize against aberrant or aberrantly expressed forms, such as mutant or inappropriately expressed isoforms. In yet other embodiments, protein fusions having a toxic moiety are administered to ablate cells that aberrantly accumulate MDZ3, MDZ4, MDZ7 or MDZ12, respectively.

[0655] In another embodiment of the therapeutic methods of the present invention, a therapeutically effective amount of a pharmaceutical composition comprising nucleic acid of the present invention is administered. The nucleic acid can be delivered in a vector that drives expression of MDZ3, MDZ4, MDZ7 or MDZ12 protein, fusion, or fragment thereof, or without such vector.

[0656] Nucleic acid compositions that can drive expression of MDZ3, MDZ4, MDZ7 or MDZ12 are administered, for example, to complement a deficiency in native MDZ3, MDZ4, MDZ7 or MDZ12, or as DNA vaccines. Expression vectors derived from virus, replication deficient retroviruses, adenovirus, adeno-associated (AAV) virus, herpes virus, or vaccinia virus can be used—see, e.g., Cid-Arregui (ed.), Viral Vectors: Basic Science and Gene Therapy, Eaton Publishing Co., 2000 (ISBN: 188129935X)—as can plasmids Antisense nucleic acid compositions, or vectors that drive expression of MDZ3, MDZ4, MDZ7 or MDZ12 antisense nucleic acids, are administered to downregulate transcription and/or translation of MDZ3, MDZ4, MDZ7 or MDZ12 in circumstances in which excessive production, or production of aberrant protein, is the pathophysiologic basis of disease.

[0657] Antisense compositions useful in therapy can have sequence that is complementary to coding or to noncoding regions of the MDZ3, MDZ4, MDZ7 or MDZ12 genes, respectively. For example, oligonucleotides derived from the transcription initiation site, e.g., between positions −10 and +10 from the start site, are particularly useful.

[0658] Catalytic antisense compositions, such as ribozymes, that are capable of sequence-specific hybridization to MDZ3, MDZ4, MDZ7 or MDZ12 transcripts, are also useful in therapy. See, e.g., Phylactou, Adv. Drug Deliv. Rev. 44(2-3):97-108 (2000); Phylactou et al., Hum. Mol. Genet. 7(10):1649-53 (1998); Rossi, Ciba Found. Symp. 209:195-204 (1997); and Sigurdsson et al., Trends Biotechnol. 13(8):286-9 (1995), the disclosures of which are incorporated herein by reference in their entireties.

[0659] Other nucleic acids useful in the therapeutic methods of the present invention are those that are capable of triplex helix formation in or near the MDZ3, MDZ4, MDZ7 or MDZ12 genomic locus, respectively. Such triplexing oligonucleotides are able to inhibit transcription, Intody et al., Nucleic Acids Res. 28(21):4283-90 (2000); McGuffie et al., Cancer Res. 60(14):3790-9 (2000), the disclosures of which are incorporated herein by reference, and pharmaceutical compositions comprising such triplex forming oligos (TFOs) are administered in circumstances in which excessive production, or production of aberrant protein, is a pathophysiologic basis of disease.

[0660] In another embodiment of the therapeutic methods of the present invention, a therapeutically effective amount of a pharmaceutical composition comprising an antibody (including fragment or derivative thereof) of the present invention is administered. As is well known, antibody compositions are administered, for example, to antagonize activity of MDZ3, MDZ4, MDZ7 or MDZ12, respectively, or to target therapeutic agents to sites of MDZ3, MDZ4, MDZ7 or MDZ12 presence and/or accumulation.

[0661] In another embodiment of the therapeutic methods of the present invention, a pharmaceutical composition comprising a non-antibody antagonist of MDZ3, MDZ4, MDZ7 or MDZ12 is administered. Antagonists of MDZ3, MDZ4, MDZ7 or MDZ12 can be produced using methods generally known in the art. In particular, purified MDZ3, MDZ4, MDZ7 or MDZ12 (MDZ12a, MDZ12bS, or MDZ12bL) can be used to screen libraries of pharmaceutical agents, often combinatorial libraries of small molecules, to identify those that specifically bind and antagonize at least one activity of MDZ3, MDZ4, MDZ7 or MDZ12, respectively.

[0662] In other embodiments a pharmaceutical composition comprising an agonist of MDZ3, MDZ4, MDZ7 or MDZ12 is administered. Agonists can be identified using methods analogous to those used to identify antagonists.

[0663] In still other therapeutic methods of the present invention, pharmaceutical compositions comprising host cells that express MDZ3, MDZ4, MDZ7 or MDZ12, fusions, or fragments thereof can be administered. In such cases, the cells are typically autologous, so as to circumvent xenogeneic or allotypic rejection, and are administered to complement defects in MDZ3, MDZ4, MDZ7 or MDZ12 production or activity.

[0664] In other embodiments, pharmaceutical compositions comprising the MDZ3, MDZ4, MDZ7 or MDZ12 proteins, nucleic acids, antibodies, antagonists, and agonists of the present invention can be administered in combination with other appropriate therapeutic agents. Selection of the appropriate agents for use in combination therapy can be made by one of ordinary skill in the art according to conventional pharmaceutical principles. The combination of therapeutic agents or approaches can act additively or synergistically to effect the treatment or prevention of the various disorders described above, providing greater therapeutic efficacy and/or permitting use of the pharmaceutical compositions of the present invention using lower dosages, reducing the potential for adverse side effects.

[0665] Transgenic Animals and Cells

[0666] In another aspect, the invention provides transgenic cells and non-human organisms comprising MDZ3, MDZ4, MDZ7 or MDZ12 insofar nucleic acids, and transgenic cells and non-human organisms with targeted disruption of the endogenous orthologue of the human MDZ3, MDZ4, MDZ7 or MDZ12 gene, respectively.

[0667] The cells can be embryonic stem cells or somatic cells. The transgenic non-human organisms can be chimeric, nonchimeric heterozygotes, and nonchimeric homozygotes.

[0668] Diagnostic Methods

[0669] The nucleic acids of the present invention can be used as nucleic acid probes to assess the levels of MDZ3, MDZ4, MDZ7, MDZ12a or MDZ12b mRNA in disease tissues or cells, and antibodies of the present invention can be used to assess the expression levels of MDZ3, MDZ4, MDZ7, MDZ12a or MDZ12b proteins in disease tissues or cells to diagnose a variety of diseases, including developmental disorders and cancer.

[0670] The following examples are offered for purpose of illustration, not limitation.

### EXAMPLE 1

### Identification and Characterization of cDNAs Encoding MDZ3 Proteins

[0671] Bioinformatic algorithms were applied to human genomic sequence data to identify putative exons. Using a graphical display particularly designed to facilitate computerized query of the resulting exon, eight exons were identified as belonging to the same gene.

[0672] Marathon-Ready™ HeLa cell cDNA (Clontech Laboratories, Palo Alto, Calif.) was used as a substrate for standard RACE (rapid amplification of cDNA ends). Marathon-Ready™ cDNAs are adaptor-ligated double stranded cDNAs suitable for 3′ and 5′ RACE. Chenchik et al., BioTechniques 21:526-532 (1996); Chenchik et al., CLONTECHniques X(1):5-8 (January 1995). RACE techniques are described, inter alia, in the Marathon-Ready™ cDNA User Manual (Clontech Labs., Palo Alto, Calif., USA, Mar. 30, 2000, Part No. PT1156-1 (PR03517)), Ausubel et al. (eds.), Short Protocols in Molecular Biology: A Compendium of Methods from Current Protocols in Molecular Biology, 4^{th} edition (April 1999), John Wiley & Sons (ISBN: 047132938X) and Sambrook et al. (eds.), Molecular Cloning: A Laboratory Manual (3rd ed.), Cold Spring Harbor Laboratory Press (2000) (ISBN: 0879695773), the disclosures of which are incorporated herein by reference in their entireties.

[0673] Two overlapping RACE products were cloned that together span 2.0 kilobases and that together appear to contain the entire coding region of the gene to which the exons contribute; for reasons described below, we termed this cDNA MDZ3.

[0674] The MDZ3 cDNA was sequenced on both strands using a MegaBace™ sequencer (Molecular Dynamics, Inc., Sunnyvale, Calif., USA). Sequencing both strands provided us with the exact chemical structure of the cDNA, which is shown in FIG. 3 and further presented in the SEQUENCE LISTING as SEQ ID NO: 1, and placed us in actual physical possession of the entire set of single-base incremented fragments of the sequenced clone, starting at the 5′ and 3′ termini.

[0675] MDZ3 cDNA was sent to the American Type Culture Collection (ATCC) for deposit on Aug. 1, 2001, received by ATCC on Aug. 2, 2001, and accorded accession number ______.

[0676] As shown in FIG. 3, the MDZ3 cDNA spans 1981 nucleotides and contains an open reading frame from nucleotide 311 through and including nt 1945 (inclusive of termination codon), predicting a protein of 544 amino acids with a (posttranslationally unmodified) molecular weight of 61.4 kD. The open reading frame appears full length with in-frame 5′ stop codons, a methionine start codon and a stop codon.

[0677] BLAST query of genomic sequence identified one BAC, spanning 14 kb, that constitute the minimum set of clones encompassing the cDNA sequence. Based upon the known origin of the BAC (GenBank accession number AC005020.5), the MDZ3 gene can be mapped to human chromosome 7q22.1.

[0678] Comparison of the cDNA and genomic sequences identified 8 exons. Exon organization is listed in Table 1.

TABLE 1
MDZ3 Exon Structure

| Exon | | | BAC |
|---|---|---|---|
| no. | cDNA range | genomic range | accession |
| 1 | 1-52 | 78844-78793 | AC005020.5 |
| 2 | 53-179 | 77284-77158 | |
| 3 | 180-264 | 76761-76677 | |
| 4 | 265-697 | 76248-75816 | |
| 5 | 698-899 | 74436-74235 | |
| 6 | 900-991 | 73260-73169 | |
| 7 | 992-1115 | 71752-71629 | |
| 8 | 1116-1981 | 66618-65753 | |

[0679] FIG. 2 schematizes the exon organization of the MDZ3 clone.

[0680] At the top is shown the bacterial artificial chromosome (BAC), with GenBank accession number, that spans the MDZ3 locus.

[0681] As shown in FIG. 2, MDZ3, encoding a protein of 544 amino acids, is comprised of exons 1-8. Predicted molecular weight of the protein, prior to any post-translational modification, is 61.4 kD.

[0682] As further discussed in the examples herein, expression of MDZ3 was assessed using RT-PCR. RT-PCR product for MDZ3 was clearly produced from brain, testis, heart and bone marrow, but not from lung, liver, or skeletal muscle.

[0683] The sequence of the MDZ3 cDNA was used as a BLAST query into the GenBank nr and dbEst databases. The nr database includes all non-redundant GenBank coding sequence translations, sequences derived from the 3-dimensional structures in the Brookhaven Protein Data Bank (PDB), sequences from SwissProt, sequences from the protein information resource (PIR), and sequences from protein research foundation (PRF). The dbEst (database of expressed sequence tags) includes ESTs, short, single pass read cDNA (mRNA) sequences, and cDNA sequences from differential display experiments and RACE experiments. BLAST search identified two human ESTs (BE540085, AW892105), multiple mouse and rat ESTs, one EST from bovine (BE750886) and one from pig (BF079982) as having sequence closely related to MDZ3.

[0684] Globally, human MZD3 resembles a 604 amino acid residue hypothetical zinc finger protein, KIAA0426, at 36% amino acid identity and 47% amino acid similarity over 560 amino acids.

[0685] Motif searches using Pfam (http://pfam.wustl. edu), SMART (http://smart.embl-heidelberg.de), and PROSITE pattern and profile databases (http://www. expasy.ch/prosite), identified several known domains shared with SCAN box containing Kruppel family zinc-finger proteins.

[0686] FIG. 1 shows the domain structure of MDZ3 and the alignment of SCAN box and KRAB domain in MDZ3 with similar motifs.

[0687] As schematized in FIG. 1, the newly isolated gene product shares certain protein domains and an overall structural organization with SCAN box—containing Kruppel family zinc-finger proteins. The shared structural features strongly imply that MDZ3 plays a role similar to that of other SCAN box—containing Kruppel family zinc-finger proteins as regulators of gene expression, and participates in protein-protein interactions with other transcription modulators. Thus MDZ3 is a clinically useful diagnostic marker and potential therapeutic agent for a ranges of diseases, including developmental disorders and cancer.

[0688] Possession of the genomic sequence permitted search for promoter and other control sequences for the MDZ3 gene.

[0689] A putative transcriptional control region, inclusive of promoter and downstream elements, was defined as 1 kb around the transcription start site, itself defined as the first nucleotide of the MDZ3 cDNA clone. The region, drawn from sequence of BAC AC005020.5, has the sequence given in SEQ ID NO: 24, which lists 1000 nucleotides before the transcription start site.

[0690] Transcription factor binding sites were identified using a web based program (http://motif. genome.ad.jp/), including two binding site for sex-determining region Y gene product (SRY, 474-480 bp and 482-488), for myoblast determining factor (961-970 bp), and for homeo domain factor Nkx-2.5/Csx, tinman homolog (589-597 bp, with numbering according to SEQ ID NO: 24), amongst others.

[0691] We have thus identified a newly described human gene, MDZ3, which shares certain protein domains and an overall structural organization with SCAN box containing Kruppel family zinc-finger proteins. The shared structural features strongly imply that the MDZ3 protein plays a role similar to the other SCAN box containing Kruppel family zinc-finger proteins. It likely functions as a regulator of gene expression and participates in protein-protein interactions with other transcription modulators; thus, the MDZ3 proteins and nucleic acids are clinically useful diagnostic markers and potential therapeutic agents for a range of diseases, including developmental disorders and cancer.

### EXAMPLE 2

### Identification and Characterization of cDNAs Encoding MDZ4 Proteins

[0692] Predicating our gene discovery efforts on use of genome-derived single exon probes and hybridization to genome-derived single exon microarrays—an approach that we have previously demonstrated will readily identify novel genes that have proven refractory to mRNA-based identification efforts—we identified an exon in raw human genomic sequence that is particularly expressed in human bone marrow, brain, heart, HeLa, adult liver, fetal liver, lung, placenta and prostate.

[0693] Briefly, bioinformatic algorithms were applied to human genomic sequence data to identify putative exons. Each of the predicted exons was amplified from genomic DNA, typically centering the putative coding sequence within a larger amplicon that included flanking noncoding sequence. These genome-derived single exon probes were arrayed on a support and expression of the bioinformatically predicted exons assessed through a series of simultaneous two-color hybridizations to the genome-derived single exon microarrays.

[0694] The approach and procedures are further described in detail in Penn et al., “Mining the Human Genome using Microarrays of Open Reading Frames,” Nature Genetics 26:315-318 (2000); commonly owned and copending U.S. patent application Ser. No. 09/864,761, filed May 23, 2001, Ser. No. 09/774,203, filed Jan. 29, 2001, and Ser. No. 09/632,366, filed Aug. 3, 2000, the disclosures of which are incorporated herein by reference in their entireties.

[0695] Using a graphical display particularly designed to facilitate computerized query of the resulting exon-specific expression data, as further described in commonly owned and copending U.S. patent application commonly owned and copending U.S. patent application Ser. No. 09/864,761, filed May 23, 2001, and Ser. No. 09/774,203, filed Jan. 29, 2001, the disclosures of which are incorporated herein by reference in their entireties, two exons were identified that are expressed in all the human tissues tested; subsequent analysis revealed that the two exons belong to the same gene.

[0696] Table 2 summarizes the microarray expression data obtained using genome-derived single exon probes corresponding to exons 2 and 3. Each probe was completely sequenced on both strands prior to its use on a genome-derived single exon microarray; sequencing confirmed the exact chemical structure of each probe. An added benefit of sequencing is that it placed us in possession of a set of single base-incremented fragments of the sequenced nucleic acid, starting from the sequencing primer's 3′ OH. (Since the single exon probes were first obtained by PCR amplification from genomic DNA, we were of course additionally in possession of an even larger set of single base incremented fragments of each of the single exon probes, each fragment corresponding to an extension product from one of the two amplification primers.)

[0697] Signals and expression ratios are normalized values measured and calculated as further described in commonly owned and copending U.S. patent application Ser. No. 09/864,761, filed May 23, 2001, 09/774,203, filed Jan. 29, 2001, and Ser. No. 09/632,366, filed Aug. 3, 2000, the disclosures of which are incorporated herein by reference in their entireties.

TABLE 2
Expression Analysis
Genome-Derived Single Exon Microarray

| | | | Ampl_9581 | |
|---|---|---|---|---|
| | Ampl_31808 (exon_2) | | (exon_3) | |
| | Signal | Expression ratio | Signal | Expression ratio |
| ADULT | n/d | n/d | 1.4 | −1.04 |
| LIVER | | | | |
| BONE | 1.32 | −1.69 | n/d | n/d |
| MARROW | | | | |
| BRAIN | 1.43 | −1.63 | 1.75 | n/d |
| FETAL | 2.17 | −1.11 | 1.07 | −1.16 |
| LIVER | | | | |
| HEART | 1.78 | −1.22 | 1.22 | −1.07 |
| HELA | 2.04 | −1.12 | 1.75 | 1.01 |
| LUNG | 0.78 | n/d | n/d | n/d |
| PLACENTA | 1.23 | −2.54 | 1.61 | 1 |
| PROSTATE | 1.55 | n/d | n/d | n/d |

[0698] As shown in Table 2, significant expression of exons 2 and 3 was seen only in human bone marrow, brain, heart, hela, adult liver, fetal liver, lung, placenta and prostate.

[0699] Marathon-Ready™ placenta cDNA (Clontech Laboratories, Palo Alto, Calif., USA) was used as a substrate for standard RACE (rapid amplification of cDNA ends) to obtain a cDNA clone that spans 1.3 kilobases and appears to contain the entire coding region of the gene to which the exon contributes; for reasons described below, we termed this cDNA MDZ4. Marathon-Ready™ cDNAs are adaptor-ligated double stranded cDNAs suitable for 3′ and 5′ RACE. Chenchik et al., BioTechniques 21:526-532 (1996); Chenchik et al., CLONTECHniques X(1) :5-8 (January 1995). RACE techniques are described, inter alia, in the Marathon-Ready™ cDNA User Manual (Clontech Labs., Palo Alto, Calif., USA, Mar. 30, 2000, Part No. PT1156-1 (PR03517)), Ausubel et al. (eds.), Short Protocols in Molecular Biology: A Compendium of Methods from Current Protocols in Molecular Biology, 4^{th} edition (April 1999), John Wiley & Sons (ISBN: 047132938X) and Sambrook et al. (eds.), Molecular Cloning: A Laboratory Manual (3rd ed.), Cold Spring Harbor Laboratory Press (2000) (ISBN: 0879695773), the disclosures of which are incorporated herein by reference in their entireties.

[0700] The MDZ4 cDNA was sequenced on both strands using a MegaBace™ sequencer (Molecular Dynamics, Inc., Sunnyvale, Calif., USA). Sequencing both strands provided us with the exact chemical structure of the cDNA, which is shown in FIG. 6 and further presented in the SEQUENCE LISTING as SEQ ID NO: 3027, and placed us in actual physical possession of the entire set of single-base incremented fragments of the sequenced clone, starting at the 5′ and 3′ termini.

[0701] MDZ4 cDNA was sent for deposit to the American Type Culture Collection on Aug. 1, 2001, received at ATCC on Aug. 2, 2001, and accorded accession number ______.

[0702] As shown in FIG. 6, the MDZ4 cDNA spans 1329 nucleotides and contains an open reading frame from nucleotide 142 through and including nt 1311 (inclusive of termination codon), predicting a protein of 389 amino acids with a (posttranslationally unmodified) molecular weight of 44.9 kD. The clone appears full length, with the reading frame opening with a methionine and terminating with a stop codon.

[0703] BLAST query of genomic sequence identified one PAC, spanning 128 kb, that constitutes the minimum set of clones encompassing the cDNA sequence. Based upon the known origin of the PAC (GenBank accession numbers Z98745.1), the MDZ4 gene can be mapped to human chromosome 6p21.3-22.2.

[0704] Comparison of the cDNA and genomic sequences identified 4 exons. Exon organization is listed in Table 3.

TABLE 3
MDZ4 Exon Structure

| Exon | | | PAC |
|---|---|---|---|
| no. | cDNA range | genomic range | accession |
| 1 | 1-64 | 62122-62059 | Z98745.1 |
| 2 | 65-549 | 55003-54519 | |
| 3 | 550-697 | 54267-54120 | |
| 4 | 698-1328 | 53738-53107 | |

[0705] FIG. 5 schematizes the exon organization of the MDZ4 clone.

[0706] At the top is shown the P1 artificial chromosome (PAC), with GenBank accession number, that span the MDZ4 locus. The genome-derived single-exon probe first used to demonstrate expression from this locus is shown below the PAC and is labeled “500”. The 500 bp probe includes sequence drawn from exon two as well as flanking intron two.

[0707] As shown in FIG. 5, MDZ4, encoding a protein of 389 amino acids, comprising exons 1-4. Predicted molecular weight, prior to any post-translational modification, is 44.9 kD.

[0708] As further discussed in the examples herein, expression of MDZ4 was assessed using hybridization to genome-derived single exon microarrays. Microarray analysis of exons 2 and 3 showed expression in all tissues tested, namely, in human bone marrow, brain, heart, hela, adult liver, fetal liver, lung, placenta and prostate.

[0709] The sequence of the MDZ4 cDNA was used as a BLAST query into the GenBank nr and dbEst databases. The nr database includes all non-redundant GenBank coding sequence translations, sequences derived from the 3-dimensional structures in the Brookhaven Protein Data Bank (PDB), sequences from SwissProt, sequences from the protein information resource (PIR), and sequences from protein research foundation (PRF). The dbEst (database of expressed sequence tags) includes ESTs, short, single pass read cDNA (mRNA) sequences, and cDNA sequences from differential display experiments and RACE experiments. BLAST search identified one human EST (BF698315) that skips exon 2, and two ESTs from pig (BF079982, BE233395) as having sequence closely related to MDZ4.

[0710] Globally, human MDZ4 resembles a family of SCAN box containing Kruppel family zinc-finger proteins, including ZNF165 protein (GenBank Accession number: P49910; 40% amino acid identity and 55% amino acid similarity over 447 a.a.), ZNF193 protein (GenBank Accession number: 015535; 54% amino acid identity and 68% amino acid similarity over 387 a.a.) and ZNF232 protein (GenBank Accession number: Q9UNY5; 47% amino acid identity and 59% amino acid similarity over 387 a.a.).

[0711] Motif searches using Pfam (http://pfam.wustl.edu), SMART (http://smart.embl-heidelberg.de), and PROSITE pattern and profile databases (http://www.expasy.ch/prosite), identified several known domains shared with SCAN box containing Kruppel family zinc-finger proteins.

[0712] FIG. 4 shows the domain structure of MDZ4, including the overall structure of MDZ4 and the alignment of the SCAN box in MDZ4 with similar motifs.

[0713] As schematized in FIG. 4, the newly isolated gene product shares certain protein domains and an overall structural organization with SCAN box containing Kruppel family zinc-finger proteins. The shared structural features strongly imply that MDZ4 plays a role similar to that of SCAN box containing Kruppel family zinc-finger proteins as a potential transcription regulator, and is likely to participate in protein-protein interactions with other transcription modulators. Thus, MDZ4 is a clinically useful diagnostic markers and potential therapeutic agents for a variety of diseases, including developmental disorders and cancer.

[0714] Possession of the genomic sequence permitted search for promoter and other control sequences for the MDZ4 gene.

[0715] A putative transcriptional control region, inclusive of promoter and downstream elements, was defined as 1 kb around the transcription start site, itself defined as the first nucleotide of the MDZ4 cDNA clone. The region, drawn from sequence of PAC Z98745.1, has the sequence given in SEQ ID NO: 3046, which lists 1000 nucleotides before the transcription start site.

[0716] Transcription factor binding sites were identified using a web based program (http://motif. genome.ad.jp/), including a binding site for CdxA (771-777 bp) and for cap signal for transcription initiation (984-991 bp, with numbering according to SEQ ID NO: 3046), amongst others.

[0717] We have thus identified a newly described human gene, MDZ4, which shares certain protein domains and an overall structural organization with SCAN box containing Kruppel family zinc-finger proteins. The shared structural features strongly imply that the MDZ4 protein plays a role similar to SCAN box containing Kruppel family zinc-finger proteins, as a potential transcription regulator, and is likely to participate in protein-protein interactions with other transcription modulators. Thus MDZ4 nucleic acids and proetins are clinically useful diagnostic markers and potential therapeutic agents for a variety of diseases, including developmental disorders and cancer.

### EXAMPLE 3

### Identification and Characterization of cDNAs Encoding MDZ7 Proteins

[0718] Bioinformatic algorithms were applied to human genomic sequence data to identify putative exons. Using a graphical display particularly designed to facilitate computerized query of the resulting exon, four exons were identified as belonging to the same gene.

[0719] Marathon-Ready™ placenta cDNA (Clontech Laboratories, Palo Alto, Calif., USA) was used as a substrate for standard RACE (rapid amplification of cDNA ends). Marathon-Ready™ cDNAs are adaptor-ligated double stranded cDNAs suitable for 3′ and 5′ RACE. Chenchik et al., BioTechniques 21:526-532 (1996); Chenchik et al., CLONTECHniques X(1):5-8 (January 1995). RACE techniques are described, inter alia, in the Marathon-Ready™ cDNA User Manual (Clontech Labs., Palo Alto, Calif., USA, Mar. 30, 2000, Part No. PT1156-1 (PR03517)), Ausubel et al. (eds.), Short Protocols in Molecular Biology: A Compendium of Methods from Current Protocols in Molecular Biology, 4^{th} edition (April 1999), John Wiley & Sons (ISBN: 047132938X) and Sambrook et al. (eds.), Molecular Cloning: A Laboratory Manual (3rd ed.), Cold Spring Harbor Laboratory Press (2000) (ISBN: 0879695773), the disclosures of which are incorporated herein by reference in their entireties.

[0720] Three overlapping RACE products were cloned that together contain the complete sequence of MDZ7, a cDNA clone that collectively spans 2.2 kilobases and appears to contain the entire coding region of the gene to which the exon contributes; for reasons described below, we termed this cDNA MDZ7.

[0721] The MDZ7 cDNA was sequenced on both strands using a MegaBace™ sequencer (Molecular Dynamics, Inc., Sunnyvale, Calif., USA). Sequencing both strands provided us with the exact chemical structure of the cDNA, which is shown in FIG. 9 and further presented in the SEQUENCE LISTING as SEQ ID NO: 4407, and placed us in actual physical possession of the entire set of single-base incremented fragments of the sequenced clone, starting at the 5′ and 3′ termini.

[0722] In order to assess expression in a variety of tissues, we generated a pair of PCR primers to analyze the expression pattern of the human MDZ7 gene in standard RT-PCR experiments (Sambrook et al., Molecular cloning: 3^{rd} edition, 2001). RT-PCR product for MDZ7 was produced from testis. These experiments placed us in possession of a near complete set of fragments of the template.

[0723] MDZ7 cDNA was sent for deposit to the American Type Culture Collection on Aug. 1, 2001, received at ATCC Aug. 2, 2001, and accorded accession number ______.

[0724] As shown in FIG. 9, the MDZ7 cDNA spans 2198 nucleotides and contains an open reading frame from nucleotide 663 through and including nt 1409 (inclusive of termination codon), predicting a protein of 248 amino acids with a (posttranslationally unmodified) molecular weight of 28.8 kD. The open reading frame appears full length with an in-frame 5′ stop codon, a methionine start codon and a stop codon before a 3′ poly-A tail.

[0725] BLAST query of genomic sequence identified one BAC, spanning 121 kb, that constitute the minimum set of clones encompassing the cDNA sequence. Based upon the known origin of the BAC (GenBank accession numbers AC002310.1), the MDZ7 gene can be mapped to human chromosome 16p11.2.

[0726] Comparison of the cDNA and genomic sequences identified 4 exons. Exon organization is listed in Table 4.

TABLE 4
MDZ7 Exon Structure

| Eexon | | | PAC |
|---|---|---|---|
| no. | cDNA range | genomic range | accession |
| 1 | 1-396 | 1531-1926 | AC002310.1 |
| 2 | 397-525 | 2497-2625 | |
| 3 | 526-1458 | 4304-5236 | |
| 4 | 1459-2198 | 6181-6920 | |

[0727] FIG. 8 schematizes the exon organization of the MDZ7 clone.

[0728] At the top is shown the bacterial artificial chromosome (BAC), with GenBank accession numbers, that spans the MDZ7 locus. As shown in FIG. 8, MDZ7 is comprised of four exons and encodes a protein of 248 amino acids. Predicted molecular weight of the MDZ7 protein, prior to any post-translational modification, is 28.8 kD.

[0729] As further discussed in the examples herein, expression of MDZ7 was assessed using RT-PCR. RT-PCR analysis of showed MDZ7 expression only in testes, but not in brain, lung, liver, kidney, keletal muscle, heart, whole fetus, or Hela cells.

[0730] The sequence of the MDZ7 cDNA was used as a BLAST query into the GenBank nr and dbEst databases. The nr database includes all non-redundant GenBank coding sequence translations, sequences derived from the 3-dimensional structures in the Brookhaven Protein Data Bank (PDB), sequences from SwissProt, sequences from the protein information resource (PIR), and sequences from protein research foundation (PRF). The dbEst (database of expressed sequence tags) includes ESTs, short, single pass read cDNA (mRNA) sequences, and cDNA sequences from differential display experiments and RACE experiments. BLAST search identified multiple human ESTs as having sequence closely related to MDZ7.

[0731] Motif searches using Pfam (http://pfam.wustl.edu), SMART (http://smart.embl-heidelberg.de), and PROSITE pattern and profile databases (http://www.expasy.ch/prosite), identified several Kruppel family zinc-finger motifs.

[0732] FIG. 7 shows the domain structure of MDZ7.

[0733] As schematized in FIG. 7, the newly isolated MDZ7 is mainly composed of seven tandemly arrayed Kruppel-type (C2H2) zinc finger repeats. Such a structure implies that MDZ7 is likely to function in sequence-specific DNA binding and impart a regulatory effect on specific gene expression. Thus MDZ7 nucleic acids and proteins are clinically useful diagnostic markers and potential therapeutic agents for a variety of diseases, including developmental disorders and cancer.

[0734] Possession of the genomic sequence permitted search for promoter and other control sequences for the MDZ7 gene.

[0735] A putative transcriptional control region, inclusive of promoter and downstream elements, was defined as 1 kb around the transcription start site, itself defined as the first nucleotide of the MDZ7 cDNA clone. The region, drawn from sequence of BAC AC002310.1, has the sequence given in SEQ ID NO: 4420, which lists 1000 nucleotides before the transcription start site.

[0736] Transcription factor binding sites were identified using a web based program (http://motif.genome.ad.jp/), including a binding site for cap signal for transcription initiation (846-853 bp, with numbering according to SEQ ID NO: 4420), amongst others.

[0737] We have thus identified a newly described human gene, MDZ7, which contains seven Kruppel family zinc-finger motifs. The structural features strongly imply that the MDZ7 protein plays a role similar to other Kruppel family zinc-finger proteins, as a potential transcription regulator. Thus, MDZ7 nucleic acids and proteins are clinically useful diagnostic markers and potential therapeutic agents for a variety of diseases, including developmental disorders and cancer.

### EXAMPLE 4

### Identification and Characterization of cDNAs Encoding MDZ12 Proteins

[0738] Bioinformatic algorithms were applied to human genomic sequence data to identify putative exons. Using a graphical display particularly designed to facilitate computerized query of the resulting exon, four exons were identified as belong to the same gene.

[0739] To RACE out the full length MDZ12a gene, human heart marathon-ready cDNA (Clontech) was used as the template, and oligonucleotides OL612 (5′-TTACTAAATCAAATGGGTGTTTTGATGGCATAAA-3′) [SEQ ID NO:7036] and OL613 (5′-GCATCAGGTGGCAAAGCTCAATCAGGACA-3′) [SEQ ID NO:7037] were used to PCR out a 1.2 kb fragment of the open reading frame (ORF) using protocols according to the manufacturer's instructions (Clontech). Marathon-Ready™ cDNAs are adaptor-ligated double stranded cDNAs suitable for 3′ and 5′ RACE. Chenchik et al., BioTechniques 21:526-532 (1996); Chenchik et al., CLONTECHniques X(1):5-8 (January 1995). RACE techniques are described, inter alia, in the Marathon-Ready™ cDNA User Manual (Clontech Labs., Palo Alto, Calif., USA, Mar. 30, 2000, Part No. PT1156-1 (PR03517)), Ausubel et al. (eds.), Short Protocols in Molecular Biology: A Compendium of Methods from Current Protocols in Molecular Biology, 4^{th} edition (April 1999), John Wiley & Sons (ISBN: 047132938X) and Sambrook et al. (eds.), Molecular Cloning: A Laboratory Manual (3rd ed.), Cold Spring Harbor Laboratory Press (2000) (ISBN: 0879695773), the disclosures of which are incorporated herein by reference in their entireties.

[0740] Using a similar protocol, oligonucleotides OL614 (5′-CACTCAATGCACGTATAGGGCCTCTCGCC-3′) [SEQ ID NO: 7038] and OL615 (5′-TGTCCTGATTGAGCTTTGCCACCTGATGC-3′) [SEQ ID NO:7039] were used to PCR out the 5′ end of the gene, oligonucleotides OL311 (5′-GGTCACCTGTACGCTCCTCTCCATGTCTCTTC-3′) [SEQ ID NO:7040] and OL312 (5′-CTGTTTGGCTTCCGACCTGCTCCTCACC-3′) [SEQ ID NO:7041] were used to PCR out the 3′ end of the gene. The PCR fragments are sequenced using a MegaBACE™ sequencer. The final contig of the sequences revealed a 1.78 kb novel gene with a 1.45 kb ORF.

[0741] To subclone MDZ12a into a cloning vector, the RACE product generated with oligonucleotides OL612 and OL638 (5′-CCACCATGTGGCTGGGGACTTCAGGGAAGAGTGGGTTAC-3′) [SEQ ID NO:7042] against human heart marathon-ready cDNA (Clontech) was ligated and T/A cloned into pGem-Teasy vector (Promega Corp.). Individual clones were picked and inserts sequenced. A second MDZ12 transcript, with the insertion of an extra exon with 66 nucleotides between exons 2 and 3 of MDZ12a, was identified. This transcript is named MDZ12b. The insertion of the extra exon introduces an early stop codon, reducing the initial ORF to 44 amino acids. However, the MDZ12b transcript does still contain another ORF downstream with 332 amino acids.

[0742] The MDZ12a cDNA was sequenced on both strands using a MegaBace™ sequencer (Molecular Dynamics, Inc., Sunnyvale, Calif., USA). Sequencing both strands provided us with the exact chemical structure of the cDNA, which is shown in FIG. 12 and further presented in the SEQUENCE LISTING as SEQ ID NO: 5770, and placed us in actual physical possession of the entire set of single-base incremented fragments of the sequenced clone, starting at the 5′ and 3′ termini.

[0743] MDZ12a and MDZ12b cDNA were deposited together in a single tube at the American Type Culture Collection; the deposit was sent to ATCC for deposit on Aug. 1, 2001, received at ATCC Aug. 2, 2001, and accorded accession number ______. As shown in FIG. 12, the MDZ12a cDNA spans 1780 nucleotides and contains an open reading frame from nucleotide 127 through and including nt 1578 (inclusive of termination codon), predicting a protein of 483 amino acids with a (posttranslationally unmodified) molecular weight of 55.1 kD. The open reading frame appears full length with in-frame 5′ stop codons, a methionine start codon and a stop codon.

[0744] As shown in FIG. 13, the MDZ12b cDNA spans at least 1518 nucleotides and contains two open reading frames. The shorter ORF, MDZ12bS, is from nucleotide 1 through and including nt 135 (inclusive of termination codon), predicting a polypeptide of 44 amino acids. While the longer ORF, MDZ12bL, is from nucleotide 520 through and including nt 1518 (inclusive of termination codon), predicting a polypeptide of 332 amino acids with a (posttranslationally unmodified) molecular weight of 38.2 kD.

[0745] BLAST query of genomic sequence identified one BAC, that constitute the minimum set of clone encompassing the cDNA sequence. Based upon the known origin of the BAC (GenBank accession numbers AC018946.5), the MDZ12 gene can be mapped to human chromosome 15q26.1.

[0746] Comparison of the cDNA and genomic sequences identified 4 exons for MDZ12a. Exon organization is listed in Table 5. The additional exon found in MDZ12b is numbered as 2′.

TABLE 5
Exon Structure of the MDZ12 gene

| Exon | | | |
|---|---|---|---|
| no. | cDNA range | genomic range | BAC accession |
| 1 | 1-107 | 155292-155186 | AC018946.5 |
| 2′ | 1-66 | 152246-152181 | |
| 2 | 108-230 | 152955-152833 | |
| 3 | 231-337 | 145120-145226 | |
| 4 | 338-1756 | 146307-147730 | |

[0747] FIG. 11 schematizes the exon organization of the MDZ12 clones.

[0748] At the top is shown the bacterial artificial chromosome (BAC), with GenBank accession numbers, that spans the MDZ12 locus.

[0749] As shown in FIG. 11, MDZ12a encodes a protein of 483 amino acids, comprising exons 1-4. Predicted molecular weight of the protein, prior to any post-translational modification, is 55.1 kD. The inclusion of a novel exon between exons 2 and 3 introduces an inframe stop codon in MDZ12b, and thus MDZ12b encodes a short polypeptide of 44 amino acids (MDZ12bS). The use of an internal methionine as initiation methionine in MDZ12b could potentially encode a 332 amino acid protein (MDZ12bL). The predicted molecular weight of the MDZ12bL protein, prior to any post-translational modification, is 38.2 kD.

[0750] Expression of MDZ12 was assessed using RT-PCR. The abundance of PCR product indicates that MDZ12a is expressed in all tissue examined with highest expression in brain, heart, skeletal muscle, testis and Hela cells. MDZ12b, however, is expressed with lower to much lower abundance compared with MDZ12a in bone marrow, brain, heart, kidney, placenta, skeletal muscle, testis and Hela cells with almost no expression in liver.

[0751] The sequences of the MDZ12a and MDZ12b cDNA were used as BLAST queries into the GenBank nr and dbEst databases. The nr database includes all non-redundant GenBank coding sequence translations, sequences derived from the 3-dimensional structures in the Brookhaven Protein Data Bank (PDB), sequences from SwissProt, sequences from the protein information resource (PIR), and sequences from protein research foundation (PRF). The dbEst (database of expressed sequence tags) includes ESTs, short, single pass read cDNA (mRNA) sequences, and cDNA sequences from differential display experiments and RACE experiments. BLAST search identified multiple human ESTs as having sequence closely related to MDZ12.

[0752] Motif searches using Pfam (http://pfam.wustl.edu), SMART (http://smart.embl-heidelberg.de), and PROSITE pattern and profile databases (http://www.expasy.ch/prosite), identified several known domains shared with KRAB domain containing Kruppel family zinc-finger proteins for MDZ12a and Kruppel family zinc-fingers for MDZ12bL.

[0753] FIG. 10A shows the domain structure of MDZ12, including the overall structure of MDZ12a and MDZ12bL, with FIG. 10B showing the alignment of KRAB domain in MDZ12a with similar motifs.

[0754] As schematized in FIGS. 10A and 10B, the newly isolated MDZ12a contains a partial KRAB motif as well as twelve copies of C2H2 zinc fingers. The MDZ12bL contains twelve copies of C2H2 zinc fingers. Such features strongly imply that MDZ12 plays a role as a potential transcription regulator, and is likely to participate in protein-protein interactions with other transcription modulators. Thus MDZ12 nucleic acids and proteins are clinically useful diagnostic markers and potential therapeutic agents for a variety of diseases, including developmental disorders and cancer.

[0755] Possession of the genomic sequence permitted search for promoter and other control sequences for the MDZ12 gene.

[0756] A putative transcriptional control region, inclusive of promoter and downstream elements, was defined as 1 kb around the transcription start site, itself defined as the first nucleotide of the MDZ12 cDNA clone. The region, drawn from sequence of BAC AC018946.5, has the sequence given in SEQ ID NO: 5783, which lists 1000 nucleotides before the transcription start site.

[0757] Transcription factor binding sites were identified using a web based program (http://motif.genome.ad.jp/), including a binding site for signal transducers and activators of transcription (STATx, 837-845 bp) and for GATA-binding factor 1 (GATA-1, 926-935 bp), with numbering according to SEQ ID NO: 5783), amongst others.

[0758] We have thus identified a newly described human gene, MDZ12, which shares certain protein domains and an overall structural organization with KRAB box containing Kruppel family zinc-finger proteins. The shared structural features strongly imply that the MDZ12a and MDZ12bL proteins play a role similar to KRAB box containing Kruppel family zinc-finger proteins, as a potential transcription regulator, and is likely to participate in protein-protein interactions with other transcription modulators. Thus MDZ12 is a clinically useful diagnostic marker and potential therapeutic agent for a variety of diseases, including developmental disorders and cancer.

### EXAMPLE 5

### RT-PCR Analysis of Expression of Human MDZ3

[0759] RT-PCR analysis was used to determine the expression pattern of the human MDZ3 gene. A forward primer (5′-GATGGCGGAAGCTCCTCAGC) [SEQ ID NO:7043] and a reverse primer (5′-AGTCCTGCGGTTCCACATAC) [SEQ ID NO:7044] derived from the middle of the MDZ3 gene were used in standard RT-PCRs (Sambrook et al., Molecular Cloning (3rd ed.), 2001). Templates for the PCRs were obtained from brain, liver, lung, bone marrow, heart, skeletal muscle, and testis and reactions were carried out according to the following schedule: 94° C., 20 seconds; 68° C. 20 seconds; 72° C., 60 seconds, for 35 cycles). PCR products were separated on an agarose gel and visualized with a Typhoon™ fluorimager and ImageQuant™ software (Molecular Dynamics, Sunnyvale, Calif.). RT-PCR product for MDZ3 was produced from brain, testis, heart and bone marrow, but not from lung, liver, or skeletal muscle (FIG. 14).

### EXAMPLE 6

### RT-PCR Analysis of Expression of Human MDZ7

[0760] RT-PCR analysis was used to determine the expression pattern of the human MDZ7 gene. A forward primer (5′-TCAGATCTGTCGCTCCTTCA) [SEQ ID NO:7045] and a reverse primer (5′-GCAGTCTGAGCACGCGTAAG) [SEQ ID NO:7046] derived from the open reading frame of MDZ7 were used in standard RT-PCRs (Sambrook et al., Molecular cloning: 3^{rd} edition, 2001). Templates for the PCRs were obtained from whole fetus, liver, lung, kidney, heart, and testis and reactions were carried out according to the following schedule: 94° C., 20 seconds; 68° C. 20 seconds; 72° C., 60 seconds, for 35 cycles). PCR products were separated on an agarose gel and visualized with a Typhoons fluorimager and ImageQuan™ software (Molecular Dynamics, Sunnyvale, Calif.). RT-PCR product for MDZ7 was only produced from testis (FIG. 15).

### EXAMPLE 7

### RT-PCR Analysis of MDZ12 Expression

[0761] To explore the potential function of the MDZ12 gene, the expression of MDZ12 gene in human tissues was examined by PCR using marathon-ready cDNAs. Oligonucleotides OL612 and OL638 were used to amplify both MDZ12a and MDZ12b from human cDNAs of bone marrow, brain, heart, kidney, liver, placenta, skeletal muscle, testis and Hela cells. The PCR conditions were according to a touchdown PCR procedure. The tubes containing the oligonucleotides, cDNA and Taq polymerase were first incubated at 94° C. for 15 seconds followed by 72° C. for 2 minutes, cycle 5 times. The tubes were then incubated at 94° C. for 15 seconds followed by 70° C. for 2 minutes, cycle 5 times. Finally the tubes were incubated at 94° C. for 15 seconds followed by 68° C. for 2 minutes, cycle 25 times. The result of the expression profile is shown in FIG. 16. The abundance of PCR product indicates that MDZ12a is expressed in all tissue examined with highest expression in brain, heart, skeletal muscle, testis and Hela cells (FIG. 16). MDZ12b, however, is expressed with lower to much lower abundance compared with MDZ12a in bone marrow, brain, heart, kidney, placenta, skeletal muscle, testis and Hela cells with almost no expression in liver.

### EXAMPLE 8

### Preparation and Labeling of Useful Fragments of MDZ3, MDZ4, MDZ7 and MDZ12

[0762] Useful fragments of MDZ3, MDZ4, MDZ7 and MDZ12 are produced by PCR, using standard techniques, or solid phase chemical synthesis using an automated nucleic acid synthesizer. Each fragment is sequenced, confirming the exact chemical structure thereof.

[0763] The exact chemical structure of preferred fragments is provided in the attached SEQUENCE LISTING, the disclosure of which is incorporated herein by reference in its entirety. The following summary identifies the fragments whose structures are more fully described in the SEQUENCE LISTING:

| | |
|---|---|
| SEQ ID NO: 1 | (nt, full length MDZ3 cDNA) |
| SEQ ID NO: 2 | (nt, cDNA ORF of MDZ3) |
| SEQ ID NO: 3 | (aa, full length protein of MDZ3) |
| SEQ ID NO: 4 | (nt, nt 201-1721 of MDZ3) |
| SEQ ID NO: 5 | (nt, 5′ UT portion of SEQ ID NO: 4) |
| SEQ ID NO: 6 | (nt, coding region of SEQ ID NO: 4) |
| SEQ ID NO: 7 | (aa, aa 1-470, CDS entirely within SEQ |
| | ID NO: 6) |
| SEQ ID NOs: 8-15 | (nt, exon 1-8 from genomic sequence of |
| | MDZ3) |
| SEQ ID NOs: 16-23 | (nt, 500 bp genomic amplicon centered |
| | about exons 1-8 of MDZ3) |
| SEQ ID NO: 24 | (nt, 1000 bp putative promoter of MDZ3) |
| | SEQ ID NOs: 25-1529 (nt, 17-mers |
| | scanning nt 201-1721 of human MDZ3) |
| SEQ ID NOs: 1530-3026 | (nt, 25-mers scanning nt 201-1721 of |
| | human MDZ3) |
| SEQ ID NO: 3027 | (nt, full length MDZ4 cDNA) |
| SEQ ID NO: 3028 | (nt, cDNA ORF of MDZ4) |
| SEQ ID NO: 3029 | (aa, full length protein of MDZ4) |
| SEQ ID NO: 3030 | (nt, nt 65-549, portion of MDZ4) |
| SEQ ID NO: 3031 | (nt, 5′ UT portion of SEQ ID NO: 3030) |
| SEQ ID NO: 3032 | (nt, coding region of SEQ ID NO: 3030) |
| SEQ ID NO: 3033 | (aa, aa 1-136, CDS entirely within SEQ |
| | ID NO: 3032) |
| SEQ ID NO: 3034 | (nt, nt 1095-1329, portion of MDZ4) |
| SEQ ID NO: 3035 | (nt, coding region of SEQ ID NO: 3034) |
| SEQ ID NO: 3036 | (nt, 3′ UT portion of SEQ ID NO: 3034) |
| SEQ ID NO: 3037 | (aa, aa 319-389, CDS entirely within |
| | SEQ ID NO: 3035) |
| SEQ ID NOs: 3038-3041 | (nt, exons 1-4, from genomic sequence, |
| | of MDZ4) |
| SEQ ID NOs: 3042-3045 | (nt, 500 bp genomic amplicon centered |
| | about exons 1-4 of MDZ4) |
| SEQ ID NO: 3046 | (nt, 1000 bp putative promoter of MDZ4) |
| SEQ ID NOs: 3047-3515 | (nt, 17-mers scanning nt 65-549 of |
| | human MDZ4) |
| SEQ ID NOs: 3516-3976 | (nt, 25-mers scanning nt 65-549 of |
| | human MDZ4) |
| SEQ ID NOs: 3977-4195 | (nt, 17-mers scanning nt 1095-1329 of |
| | human MDZ4) |
| SEQ ID NOs: 4196-4406 | (nt, 25-mers scanning nt 1095-1329 of |
| | human MDZ4) |
| SEQ ID NO: 4407 | (nt, full length MDZ7 cDNA) |
| SEQ ID NO: 4408 | (nt, cDNA ORF of MDZ7) |
| SEQ ID NO: 4409 | (aa, full length protein of MDZ7) |
| SEQ ID NO: 4410 | (nt, nt 1-395, portion of MDZ7) |
| SEQ ID NO: 4411 | (nt, nt 1459-1778, portion of MDZ7) |
| SEQ ID NOs: 4412-4415 | (nt, exons 1-4, from genomic sequence, |
| | of MDZ7) |
| SEQ ID NOs: 4416-4419 | (nt, 500 bp genomic amplicon centered |
| | about exon 1-4 of MDZ7) |
| SEQ ID NO: 4420 | (nt, 1000 bp putative promoter of MDZ7) |
| SEQ ID NOs: 4421-4799 | (nt, 17-mers scanning nt 1-395 of |
| | human MDZ7) |
| SEQ ID NOs: 4800-5170 | (nt, 25-mers scanning nt 1-395 of |
| | human MDZ7) |
| SEQ ID NOs: 5171-5474 | (nt, 17-mers scanning nt 1459-1778 of |
| | human MDZ7) |
| SEQ ID NOs: 5475-5769 | (nt, 25-mers scanning nt 1459-1778 of |
| | human MDZ7) |
| SEQ ID NO: 5770 | (nt, full length MDZ12 cDNA) |
| SEQ ID NO: 5771 | (nt, cDNA ORF of MDZ12) |
| SEQ ID NO: 5772 | (aa, full length protein of MDZ12) |
| SEQ ID NO: 5773 | (nt, nt 352-948, portion of MDZ12) |
| SEQ ID NO: 5774 | (aa, aa 76-274, portion of MDZ12) |
| SEQ ID NOs: 5775-5778 | (nt, exons 1-4, from genomic sequence, |
| | of MDZ12) |
| SEQ ID NOs: 5779-5782 | (nt, 500 bp genomic amplicon centered |
| | about exon 1-4 of MDZ12) |
| SEQ ID NO: 5783 | (nt, 1000 bp putative promoter of MDZ12) |
| SEQ ID NOs: 5784-6364 | (nt, 17-mers scanning nt 352-948 of |
| | human MDZ12) |
| SEQ ID NOs: 6365-6937 | (nt, 25-mers scanning nt 352-948 of |
| | human MDZ12) |
| SEQ ID NO: 6938 | (nt, cDNA of MDZ12b) |
| SEQ ID NO: 6939 | (aa, full length protein of MDZ12bS) |
| SEQ ID NO: 6940 | (aa, full length protein of MDZ12bL) |
| SEQ ID NO: 6941 | (nt, novel exon (nt 105-170 portion) |
| | of MDZ12b) |
| SEQ ID NO: 6942 | (aa, novel exon (before stop codon) of |
| | MDZ12b) |
| SEQ ID NO: 6943 | (nt, 500 bp genomic amplicon centered |
| | about novel exon of MDZ12b) |
| SEQ ID NOs: 6944-6993 | (nt, 17-mers scanning novel exon of |
| | human MDZ12b) |
| SEQ ID NOs: 6994-7035 | (nt, 25-mers scanning novel exon of |
| | human MDZ12b) |
| SEQ ID NO: 7036 | (nt, oligo OL612) |
| SEQ ID NO: 7037 | (nt, oligo OL613) |
| SEQ ID NO: 7038 | (nt, oligo OL614) |
| SEQ ID NO: 7039 | (nt, oligo OL615) |
| SEQ ID NO: 7040 | (nt, oligo OL311) |
| SEQ ID NO: 7041 | (nt, oligo OL312) |
| SEQ ID NO: 7042 | (nt, oligo OL638) |
| SEQ ID NO: 7043 | (nt, forward primer for MDZ3 RT_PCR) |
| SEQ ID NO: 7044 | (nt, reverse primer for MDZ3 RT_PCR) |
| SEQ ID NO: 7045 | (nt, forward primer for MDZ7 RT_PCR) |
| SEQ ID NO: 7046 | (nt, reverse primer for MDZ7 RT_PCR) |

[0764] Upon confirmation of the exact structure, each of the above-described nucleic acids of confirmed structure is recognized to be immediately useful as a MDZ3, MDZ4, MDZ7 or MDZ12-specific probe.

[0765] For use as labeled nucleic acid probes, the above-described MDZ3, MDZ4, MDZ7 or MDZ12 nucleic acids are separately labeled by random priming. As is well known in the art of molecular biology, random priming places the investigator in possession of a near-complete set of labeled fragments of the template of varying length and varying starting nucleotide.

[0766] The labeled probes are used to identify the MDZ3, MDZ4, MDZ7 or MDZ12 gene on a Southern blot, and are used to measure expression of MDZ3, MDZ4, MDZ7 or MDZ12 mRNA on a northern blot and by RT-PCR, using standard techniques.

### EXAMPLE 9

### Production of MDZ3, MDZ4, MDZ7 or MDZ12 Protein

[0767] The full length MDZ3, MDZ4, MDZ7, MDZ12a or MDZ12b cDNA clone is cloned into the mammalian expression vector pcDNA3.1/HISA (Invitrogen, Carlsbad, Calif., USA), transfected into COS7 cells, transfectants selected with G418, and protein expression in transfectants confirmed by detection of the anti-Xpress™ epitope according to manufacturer's instructions. Protein is purified using immobilized metal affinity chromatography and vector-encoded protein sequence is then removed with enterokinase, per manufacturer's instructions, followed by gel filtration and/or HPLC.

[0768] Following epitope tag removal, MDZ3, MDZ4, MDZ7, MDZ12a, MDZ12bS or MDZ12bL protein is present at a concentration of at least 70%, measured on a weight basis with respect to total protein (i.e., w/w), and is free of acrylamide monomers, bis acrylamide monomers, polyacrylamide and ampholytes. Further HPLC purification provides MDZ3, MDZ4, MDZ7, MDZ12a, MDZ12bS or MDZ12bL protein at a concentration of at least 95%, measured on a weight basis with respect to total protein (i.e., w/w).

### EXAMPLE 10

### Production of Anti-MDZ3, MDZ4, MDZ7 or MDZ12 Antibody

[0769] Purified proteins prepared as in Example 6 are separately conjugated to carrier proteins and used to prepare murine monoclonal antibodies by standard techniques. Initial screening with the unconjugated purified proteins, followed by competitive inhibition screening using peptide fragments of the MDZ3, MDZ4, MDZ7, MDZ12a, MDZ12bS or MDZ12bL, identifies monoclonal antibodies with specificity for MDZ3, MDZ4, MDZ7, MDZ12a, MDZ12bS or MDZ12bL.

### EXAMPLE 11

### Use of MDZ3, MDZ4, MDZ7 or MDZ12 Probes and Antibodies for Diagnosis

[0770] After informed consent is obtained, samples are drawn from tumors, and tested for MDZ3, MDZ4, MDZ7, MDZ12a or MDZ12b mRNA levels by standard techniques and tested additionally for MDZ3, MDZ4, MDZ7, MDZ12a or MDZ12b protein levels using anti-MDZ3, MDZ4, MDZ7, MDZ12a or MDZ12b antibodies in a standard ELISA. After data are unblinded, a statistically significant correlation of aberrant expression of each of the above-described genes is seen with various tumor types.

### EXAMPLE 12

### Use of MDZ3, MDZ4, MDZ7 or MDZ12 Nucleic Acids, Proteins, and Antibodies in Therapy

[0771] Once mutations of MDZ3, MDZ4, MDZ7 or MDZ12 have been detected in patients, normal MDZ3, MDZ4, MDZ7 or MDZ12 is reintroduced into the patient's tumor cells by introduction of expression vectors that drive MDZ3, MDZ4, MDZ7 or MDZ12 expression or by introducing MDZ3, MDZ4, MDZ7 or MDZ12 proteins into cells, with statistically significant improvement in patient longevity.

[0772] In patients in whom expression is increased, antibodies for the mutated forms of MDZ3, MDZ4, MDZ7 or MDZ12 are used to block the function of the abnormal forms of the protein.

### EXAMPLE 13

### MDZ3 Disease Associations

[0773] Diseases that map to the MDZ3 chromosomal region in Table 6. Mutation of the MDZ3 gene contributes more of these conditions.

TABLE 6
Diseases mapped to human chromosome 7q22.1 (MDZ3 region)

| mim_num | disease | chromosomal location |
|---|---|---|
| 209850 | Autism, susceptibility to | 7q |
| 145290 | Hyperreflexia | 7q |
| 603511 | Limb-girdle muscular | 7q |
| | dystrophy-1D | |

### EXAMPLE 14

### MDZ4 Disease Associations

[0774] Diseases that map to the MDZ4 chromosomal region in Table 7. Mutation of the MDZ4 gene contributes more of these conditions.

TABLE 7
Diseases mapped to human chromosome 6p21.3 (MDZ4 region)

| mim_num | disease | chromosomal location |
|---|---|---|
| 106300 | Ankylosing spondylitis | 6p21.3 |
| 108800 | Atrial septal defect, secundum | 6p21.3 |
| | type | |
| 146520 | Hypotrichosis simplex of scalp | 6p21.3 |
| 222100 | Insulin-dependent diabetes | 6p21.3 |
| | mellitus-1 | |
| 137100 | Immunoglobulin A deficiency | 6p21.3 |
| 146850 | Immune suppression to | 6p21.3 |
| | streptococcal antigen | |
| 604809 | Panbronchiolitis, diffuse | 6p21.3 |
| 167250 | Paget disease of bone | 6p21.3 |
| 177900 | Psoriasis susceptibility 1 | 6p21.3 |
| 179450 | Ragweed sensitivity | 6p21.3 |
| 150270 | Laryngeal adductor paralysis | 6p21.3-p21.2 |

### EXAMPLE 15

### MDZ7 Disease Associations

[0775] Diseases that map to the MDZ7 chromosomal region are shown in Table 8. Mutation of the MDZ7 gene contributes to one or more of these conditions.

TABLE 8
Diseases mapped to chromosome 16p11.2 (MDZ7 region)

| mim_num | disease | chromosomal location |
|---|---|---|
| 157700 | Mitral valve prolapse, familial | 16p12.1-p11.2 |
| 602066 | Convulsions, infantile and | 16p12-q12 |
| | paroxysmal choreoathetosis | |
| 266600 | Inflammatory bowel disease-1 | 16p12-q13 |
| 186580 | Arthrocutaneouveal | 16p12-q21 |
| | granulomatosis | |
| 128200 | Paroxysmal kinesigenic | 16p11.2-q12.1 |
| | choreoathetosis | |

### EXAMPLE 16

### MDZ12 Disease Associations

[0776] Diseases that map to the MDZ12 chromosomal region are shown in Table 9. Mutation of the MDZ12 gene contributes to one or more of these conditions.

TABLE 9
Diseases mapped to chromosome 15q26.1 (MDZ12 region)

| mim_num | disease | chromosomal location |
|---|---|---|
| 604329 | Hypertension, essential, | 15q |
| | susceptibility to, 2 | |
| 214900 | Cholestasis-lymphedema syndrome | 15q |
| 604416 | Pyogenic sterile arthritis, | 15q24-q26.1 |
| | pyoderma gangrenosum, and acne | |
| | (PAPAsyndrome) | |
| 603813 | Hypercholesterolemia, familial, | 15q25-q26 |
| | autosomal recessive, 1 | |
| 600318 | Insulin-dependent diabetes | 15q26 |
| | mellitus-3 | |
| 166800 | Otosclerosis 1 | 15q26.1-qter |

[0777] All patents, patent publications, and other published references mentioned herein are hereby incorporated by reference in their entireties as if each had been individually and specifically incorporated by reference herein. While preferred illustrative embodiments of the present invention are described, one skilled in the art will appreciate that the present invention can be practiced by other than the described embodiments, which are presented for purposes of illustration only and not by way of limitation. The present invention is limited only by the claims that follow.

What is claimed is:

1. An isolated nucleic acid that encodes a zinc finger-containing protein, comprising:
(a) a nucleotide sequence selected from the group consisting of:
(i) SEQ ID NO:1, SEQ ID NO:3027, SEQ ID NO:4407, SEQ ID NO:5770; and SEQ ID NO:6938;
(ii) the complement of the sequences set forth in (i);
(iii) the nucleotide sequence of SEQ ID NO: 2, SEQ ID NO:3028, SEQ ID NO:4408, and SEQ ID NO:5771;
(iv) a degenerate variant of the sequences set forth in (iii);
(v) the complement of the sequences set forth in (iii) and (iv); and
(vi) the nucleotide sequence of the cDNAs having ATCC accession nos. ______ (MDZ3), ______ (MDZ4), ______ (MDZ7), and ______ (MDZ12a and MDZ12b); or
(b) a nucleotide sequence selected from the group consisting of:
(i) a nucleotide sequence that encodes a polypeptide having the sequence of SEQ ID NO:3, SEQ ID NO:3029, SEQ ID NO:4409, SEQ ID NO:5772, and SEQ ID NO:6940;
(ii) a nucleotide sequence that encodes a polypeptide having the sequence of SEQ ID NO:3, SEQ ID NO:3029, SEQ ID NO:4409, SEQ ID NO:5772, SEQ ID NO:6939, and SEQ ID NO:6940, with conservative amino acid substitutions; and
(iii) the complement of the sequences set forth in (i) and (ii),
wherein said isolated nucleic acid comprising a nucleotide sequence selected from group (b) is no more than about 100 kb in length.

2. The isolated nucleic acid of claim 1 wherein said nucleic acid, or the complement of said nucleic acid, encodes a polypeptide having sequence-specific DNA binding activity.

3. The isolated nucleic acid of claim 1, wherein said nucleic acid, or the complement of said nucleic acid, is expressed in testis.

4. A nucleic acid probe, comprising:
(a) the nucleic acid of claim 1; or
(b) at least 17 contiguous nucleotides of SEQ ID NO:4, SEQ ID NO:3030, SEQ ID NO:3034, SEQ ID NO:4410, SEQ ID NO:4411, SEQ ID NO:5773, or SEQ ID NO:6941,
wherein said probe according to (b) is no longer than about 100 kb in length.

5. The probe of claim 4, wherein said probe is detectably labeled.

6. The probe of claim 4, attached to a substrate.

7. A microarray, wherein at least one probe of said array is a probe according to claim 4.

8. The isolated nucleic acid molecule of claim 1, wherein said nucleic acid molecule is operably linked to one or more expression control elements.

9. A replicable vector comprising a nucleic acid molecule of claim 1.

10. A replicable vector comprising an isolated nucleic acid molecule of claim 8.

11. A host cell transformed to contain the nucleic acid molecule of any one of claims 1 or 8-10, or the progeny thereof.

12. A method for producing a polypeptide, the method comprising: culturing the host cell of claim 11 under conditions in which the protein encoded by said nucleic acid molecule is expressed.

13. An isolated polypeptide produced by the method of claim 12.

14. An isolated polypeptide, comprising:
(a) an amino acid sequence selected from the group consisting of:
(i) SEQ ID NO:3, SEQ ID NO:3029, SEQ ID NO:4409, SEQ ID NO:5772, SEQ ID NO:6939, and SEQ ID NO:6940; and
(ii) the amino acid sequence of the cDNAs having ATCC accession nos. {______};
(b) an amino acid sequence having at least 65% amino acid sequence identity to that of (a)(i) or (a)(ii);
(c) an amino acid sequence according to (a)(i) or (a)(ii) in which at least 95% of deviations from the sequence of (a)(i) or (a)(ii) are conservative substitutions; or
(d) a fragment of at least 8 contiguous amino acids of any of (a)-(c).

15. A fusion protein, said fusion protein comprising a polypeptide of claim 14 fused to a heterologous amino acid sequence.

16. The fusion protein of claim 15, wherein said heterologous amino acid sequence is a detectable moiety.

17. The fusion protein of claim 16, wherein said detectable moiety is fluorescent.

18. The fusion protein of claim 15, wherein said heterologous amino acid sequence is an Ig Fc region.

19. An isolated antibody, or antigen-binding fragment or derivative thereof, the binding of which can be competitively inhibited by a polypeptide of claim 14.

20. A transgenic non-human animal modified to contain the nucleic acid molecule of any one of claims 1 or 8-10.

21. A transgenic non-human animal unable to express the endogenous orthologue of the nucleic acid molecule of claim 1.

22. A method of identifying agents that modulate the expression of MDZ3, MDZ4, MDZ7, or MDZ12, the method comprising:
contacting a cell or tissue sample believed to express MDZ3, MDZ4, MDZ7, or MDZ12 with a chemical or biological agent, and then
comparing the amount of MDZ3, MDZ4, MDZ7, or MDZ12 expression in said cell or tissue sample with that of a control,
changes in the amount relative to control identifying an agent that modulates expression of MDZ3, MDZ4, MDZ7, or MDZ12.

23. A method of identifying agonists and antagonists of MDZ3, MDZ4, MDZ7, or MDZ12, the method comprising:
contacting a cell or tissue sample believed to express MDZ3, MDZ4, MDZ7, or MDZ12 with a chemical or biological agent, and then
comparing the activity of MDZ3, MDZ4, MDZ7, or MDZ12 with that of a control,
increased activity relative to a control identifying an agonist, decreased activity relative to a control identifying an antagonist.

24. A purified agonist of the polypeptide of claim 14.

25. A purified antagonist of the polypeptide of claim 14.

26. A method of identifying a specific binding partner for a polypeptide according to claim 14, the method comprising:
contacting said polypeptide to a potential binding partner; and
determining if the potential binding partner binds to said polypeptide.

27. The method of claim 26, wherein said contacting is performed in vivo.

28. A purified binding partner of the polypeptide of claim 14.

29. A method for detecting a target nucleic acid in a sample, said target being a nucleic acid according to claim 1, the method comprising:
a) hybridizing the sample with a probe comprising at least 17 contiguous nucleotides of a sequence complementary to said target nucleic acid in said sample under high stringency hybridization conditions, and
b) detecting the presence or absence, and optionally the amount, of said binding.

30. A method of diagnosing a disease caused by mutation in MDZ3, MDZ4, MDZ7 or MDZ12, comprising:
detecting said mutation in a sample of nucleic acids that derives from a subject suspected to have said disease.

31. A method of diagnosing or monitoring a disease caused by altered expression of MDZ3, MDZ4, MDZ7 or MDZ12, comprising:
determining the level of expression of MDZ3, MDZ4, MDZ7, or MDZ12 in a sample of nucleic acids or proteins that derives from a subject suspected to have said disease,
alterations from a normal level of expression providing diagnostic and/or monitoring information.

32. A diagnostic composition comprising the nucleic acid of claim 1, said nucleic acid being detectably labeled.

33. The diagnostic composition of claim 32, wherein said composition is further suitable for in vivo administration.

34. A diagnostic composition comprising the polypeptide of claim 14, said polypeptide being detectably labeled.

35. The diagnostic composition of claim 34, wherein said composition is further suitable for in vivo administration.

36. A diagnostic composition comprising the antibody, or antigen-binding fragment or derivative thereof, of claim 19.

37. The diagnostic composition of claim 36, wherein said antibody or antigen-binding fragment or derivative thereof is detectably labeled.

38. The diagnostic composition of claim 37, wherein said composition is further suitable for in vivo administration.

39. A pharmaceutical composition comprising the nucleic acid of claim 1 and a pharmaceutically acceptable excipient.

40. A pharmaceutical composition comprising the polypeptide of claim 14 and a pharmaceutically acceptable excipient.

41. A pharmaceutical composition comprising the antibody or antigen-binding fragment or derivative thereof of claim 19 and a pharmaceutically acceptable excipient.

42. A pharmaceutical composition comprising the agonist of claim 24 and a pharmaceutically acceptable excipient.

43. A pharmaceutical composition comprising the antagonist of claim 25 and a pharmaceutically acceptable excipient.

44. A method for treating or preventing a disorder associated with decreased expression or activity of MDZ3, MDZ4, MDZ7, or MDZ12, the method comprising administering to a subject in need of such treatment an effective amount of the pharmaceutical composition of any of claims 39, 40 or 42.

45. A method for treating or preventing a disorder associated with increased expression or activity of MDZ3, MDZ4, MDZ7 or MDZ12, the method comprising administering to a subject in need of such treatment an effective amount of the pharmaceutical composition of claim 41 or 43.

46. A method of modulating the expression of a nucleic acid according to claim 1, the method comprising:
administering an effective amount of an agent which modulates the expression of a nucleic acid according to claim 1.

47. A method of modulating at least one activity of a polypeptide according to claim 14, the method comprising:
administering an effective amount of an agent which modulates at least one activity of a polypeptide according to claim 14.

The application's sequence listing, which the Patent Office published only in electronic form, follows.

SEQUENCE LISTING (7046 sequences)

SEQ ID NO: 1 - DNA, 1981 bp, Homo sapiens
cggatagcactggcgaccctagcgggtgagaggcccttcagggccgcggcgggttgagcgcaccatcacatctaagccatcagcaagtttgttggttttaatctccaaaatacgtcttgattttgtctgactctttgccaccaccctgatctaagcccttatcatctgcttgaatcactaacttgtctccacttgcagtttttaaaagagttgcttccatttgactttttctgtctgctgtaccaacatatgagtttcaggaggggtcattgatgcagtcattctcagtctcctcggagggagtctgaagatgcttaaagagcatccagagatggcggaagctcctcagcagcagttgggtattcctgtggtgaaactggagaaagagttgccatggggcagaggaagggaggaccctagtccagagacttttcggctgaggtttcggcagttccgctaccaggaggcagctggaccccaggaagctcttagggggctccaggagctctgtcgtcggtggctgaggcccgagttgcacaccaaggagcagatcctggagctgctggtgctggagcagttcctcactatcctgccccgcgagttctacgcctggatccgggagcatggcccagagagtggcaaggccctggccgccatggtggaggacctgacagaaagagcactggaggccaaggcggttccatgccacaggcagggagagcaggaggaaacagcactttgcagaggcgcttgggagccaggcatccagctggggccagtggaggttaagcctgaatgggggatgccccctggggaaggagttcaaggtccagacccaggtaccgaggagcagctcagtcaggaccctggagatgagacacgggccttccaggagcaagcactacctgttctgcaggcgggtcctggcctccccgcagtgaatcccagagaccaagagatggcagctgggttctttactgctggatcgcaggggttggggccatttaaagatatggccctggccttccctgaggaggagtggaggcatgtgaccccagcccagatagactgctttggggagtatgtggaaccgcaggactgcagggtctctccaggcggtgggagcaaggaaaaggaggcaaaacccccacaggaagacctgaaaggggcgctggtggcactgacatcagagaggtttggggaagcctctctccagggccctgggctcggaagggtctgtgagcaggagcctggtggccctgcaggcagtgcgcctgggcttcctcctccccagcacggtgccatccccctgcctgacgaagtcaaaacccacagctccttctggaagcctttccagtgccctgagtgtgggaaaggattcagtcggagctccaatctcgtcaggcaccagcgaacccacgaagagaagtcttatggctgtgtggagtgtgggaagggctttaccctgagagagtacctgatgaagcaccagagaacccacctgggaaagaggccctacgtgtgcagcgagtgctggaaaaccttcagccagagacaccacctggaggtgcaccagcgcagccacactggggagaagccccacaagtgcggggactgctggaagagcttcagccgcaggcagcacctgcaggtgcaccggaggacgcacaccggggagaagccctacacctgcgagtgtggcaagagcttcagcaggaatgccaatctggcggtgcaccggcgtgcccacactggcgagaagccatatgggtgccaggtgtgcgggaagcggttcagcaaaggggagcggctggtccgacaccagagaatccatacaggggagaagccctaccactgtcctgcctgcgggcgaagcttcaaccagaggtccatcctcaaccggcaccagaagacccagcaccgccaggagccgctggtgcagtgagcatagcaggtggcaggcagcaccatcattcatctt

SEQ ID NO: 2 - DNA, 1635 bp, Homo sapiens
atgcttaaagagcatccagagatggcggaagctcctcagcagcagttgggtattcctgtggtgaaactggagaaagagttgccatggggcagaggaagggaggaccctagtccagagacttttcggctgaggtttcggcagttccgctaccaggaggcagctggaccccaggaagctcttagggggctccaggagctctgtcgtcggtggctgaggcccgagttgcacaccaaggagcagatcctggagctgctggtgctggagcagttcctcactatcctgccccgcgagttctacgcctggatccgggagcatggcccagagagtggcaaggccctggccgccatggtggaggacctgacagaaagagcactggaggccaaggcggttccatgccacaggcagggagagcaggaggaaacagcactttgcagaggcgcttgggagccaggcatccagctggggccagtggaggttaagcctgaatgggggatgccccctggggaaggagttcaaggtccagacccaggtaccgaggagcagctcagtcaggaccctggagatgagacacgggccttccaggagcaagcactacctgttctgcaggcgggtcctggcctccccgcagtgaatcccagagaccaagagatggcagctgggttctttactgctggatcgcaggggttggggccatttaaagatatggccctggccttccctgaggaggagtggaggcatgtgaccccagcccagatagactgctttggggagtatgtggaaccgcaggactgcagggtctctccaggcggtgggagcaaggaaaaggaggcaaaacccccacaggaagacctgaaaggggcgctggtggcactgacatcagagaggtttggggaagcctctctccagggccctgggctcggaagggtctgtgagcaggagcctggtggccctgcaggcagtgcgcctgggcttcctcctccccagcacggtgccatccccctgcctgacgaagtcaaaacccacagctccttctggaagcctttccagtgccctgagtgtgggaaaggattcagtcggagctccaatctcgtcaggcaccagcgaacccacgaagagaagtcttatggctgtgtggagtgtgggaagggctttaccctgagagagtacctgatgaagcaccagagaacccacctgggaaagaggccctacgtgtgcagcgagtgctggaaaaccttcagccagagacaccacctggaggtgcaccagcgcagccacactggggagaagccccacaagtgcggggactgctggaagagcttcagccgcaggcagcacctgcaggtgcaccggaggacgcacaccggggagaagccctacacctgcgagtgtggcaagagcttcagcaggaatgccaatctggcggtgcaccggcgtgcccacactggcgagaagccatatgggtgccaggtgtgcgggaagcggttcagcaaaggggagcggctggtccgacaccagagaatccatacaggggagaagccctaccactgtcctgcctgcgggcgaagcttcaaccagaggtccatcctcaaccggcaccagaagacccagcaccgccaggagccgctggtgcagtga

SEQ ID NO: 3 - protein, 544 aa, Homo sapiens
MLKEHPEMAEAPQQQLGIPVVKLEKELPWGRGREDPSPETFRLRFRQFRYQEAAGPQEALRGLQELCRRWLRPELHTKEQILELLVLEQFLTILPREFYAWIREHGPESGKALAAMVEDLTERALEAKAVPCHRQGEQEETALCRGAWEPGIQLGPVEVKPEWGMPPGEGVQGPDPGTEEQLSQDPGDETRAFQEQALPVLQAGPGLPAVNPRDQEMAAGFFTAGSQGLGPFKDMALAFPEEEWRHVTPAQIDCFGEYVEPQDCRVSPGGGSKEKEAKPPQEDLKGALVALTSERFGEASLQGPGLGRVCEQEPGGPAGSAPGLPPPQHGAIPLPDEVKTHSSFWKPFQCPECGKGFSRSSNLVRHQRTHEEKSYGCVECGKGFTLREYLMKHQRTHLGKRPYVCSECWKTFSQRHHLEVHQRSHTGEKPHKCGDCWKSFSRRQHLQVHRRTHTGEKPYTCECGKSFSRNANLAVHRRAHTGEKPYGCQVCGKRFSKGERLVRHQRIHTGEKPYHCPACGRSFNQRSILNRHQKTQHRQEPLVQ

SEQ ID NO: 4 - DNA, 1521 bp, Homo sapiens
tttaaaagagttgcttccatttgactttttctgtctgctgtaccaacatatgagtttcaggaggggtcattgatgcagtcattctcagtctcctcggagggagtctgaagatgcttaaagagcatccagagatggcggaagctcctcagcagcagttgggtattcctgtggtgaaactggagaaagagttgccatggggcagaggaagggaggaccctagtccagagacttttcggctgaggtttcggcagttccgctaccaggaggcagctggaccccaggaagctcttagggggctccaggagctctgtcgtcggtggctgaggcccgagttgcacaccaaggagcagatcctggagctgctggtgctggagcagttcctcactatcctgccccgcgagttctacgcctggatccgggagcatggcccagagagtggcaaggccctggccgccatggtggaggacctgacagaaagagcactggaggccaaggcggttccatgccacaggcagggagagcaggaggaaacagcactttgcagaggcgcttgggagccaggcatccagctggggccagtggaggttaagcctgaatgggggatgccccctggggaaggagttcaaggtccagacccaggtaccgaggagcagctcagtcaggaccctggagatgagacacgggccttccaggagcaagcactacctgttctgcaggcgggtcctggcctccccgcagtgaatcccagagaccaagagatggcagctgggttctttactgctggatcgcaggggttggggccatttaaagatatggccctggccttccctgaggaggagtggaggcatgtgaccccagcccagatagactgctttggggagtatgtggaaccgcaggactgcagggtctctccaggcggtgggagcaaggaaaaggaggcaaaacccccacaggaagacctgaaaggggcgctggtggcactgacatcagagaggtttggggaagcctctctccagggccctgggctcggaagggtctgtgagcaggagcctggtggccctgcaggcagtgcgcctgggcttcctcctccccagcacggtgccatccccctgcctgacgaagtcaaaacccacagctccttctggaagcctttccagtgccctgagtgtgggaaaggattcagtcggagctccaatctcgtcaggcaccagcgaacccacgaagagaagtcttatggctgtgtggagtgtgggaagggctttaccctgagagagtacctgatgaagcaccagagaacccacctgggaaagaggccctacgtgtgcagcgagtgctggaaaaccttcagccagagacaccacctggaggtgcaccagcgcagccacactggggagaagccccacaagtgcggggactgctggaagagcttcagccgcaggcagcacctgcaggtgcaccggaggacgcacaccggggagaagccctacacctgcgagtgtggcaagagcttcagcaggaatg

SEQ ID NO: 5 - DNA, 110 bp, Homo sapiens
tttaaaagagttgcttccatttgactttttctgtctgctgtaccaacatatgagtttcaggaggggtcattgatgcagtcattctcagtctcctcggagggagtctgaag

SEQ ID NO: 6 - DNA, 1411 bp, Homo sapiens
atgcttaaagagcatccagagatggcggaagctcctcagcagcagttgggtattcctgtggtgaaactggagaaagagttgccatggggcagaggaagggaggaccctagtccagagacttttcggctgaggtttcggcagttccgctaccaggaggcagctggaccccaggaagctcttagggggctccaggagctctgtcgtcggtggctgaggcccgagttgcacaccaaggagcagatcctggagctgctggtgctggagcagttcctcactatcctgccccgcgagttctacgcctggatccgggagcatggcccagagagtggcaaggccctggccgccatggtggaggacctgacagaaagagcactggaggccaaggcggttccatgccacaggcagggagagcaggaggaaacagcactttgcagaggcgcttgggagccaggcatccagctggggccagtggaggttaagcctgaatgggggatgccccctggggaaggagttcaaggtccagacccaggtaccgaggagcagctcagtcaggaccctggagatgagacacgggccttccaggagcaagcactacctgttctgcaggcgggtcctggcctccccgcagtgaatcccagagaccaagagatggcagctgggttctttactgctggatcgcaggggttggggccatttaaagatatggccctggccttccctgaggaggagtggaggcatgtgaccccagcccagatagactgctttggggagtatgtggaaccgcaggactgcagggtctctccaggcggtgggagcaaggaaaaggaggcaaaacccccacaggaagacctgaaaggggcgctggtggcactgacatcagagaggtttggggaagcctctctccagggccctgggctcggaagggtctgtgagcaggagcctggtggccctgcaggcagtgcgcctgggcttcctcctccccagcacggtgccatccccctgcctgacgaagtcaaaacccacagctccttctggaagcctttccagtgccctgagtgtgggaaaggattcagtcggagctccaatctcgtcaggcaccagcgaacccacgaagagaagtcttatggctgtgtggagtgtgggaagggctttaccctgagagagtacctgatgaagcaccagagaacccacctgggaaagaggccctacgtgtgcagcgagtgctggaaaaccttcagccagagacaccacctggaggtgcaccagcgcagccacactggggagaagccccacaagtgcggggactgctggaagagcttcagccgcaggcagcacctgcaggtgcaccggaggacgcacaccggggagaagccctacacctgcgagtgtggcaagagcttcagcaggaatg

SEQ ID NO: 7 - protein, 470 aa, Homo sapiens
MLKEHPEMAEAPQQQLGIPVVKLEKELPWGRGREDPSPETFRLRFRQFRYQEAAGPQEALRGLQELCRRWLRPELHTKEQILELLVLEQFLTILPREFYAWIREHGPESGKALAAMVEDLTERALEAKAVPCHRQGEQEETALCRGAWEPGIQLGPVEVKPEWGMPPGEGVQGPDPGTEEQLSQDPGDETRAFQEQALPVLQAGPGLPAVNPRDQEMAAGFFTAGSQGLGPFKDMALAFPEEEWRHVTPAQIDCFGEYVEPQDCRVSPGGGSKEKEAKPPQEDLKGALVALTSERFGEASLQGPGLGRVCEQEPGGPAGSAPGLPPPQHGAIPLPDEVKTHSSFWKPFQCPECGKGFSRSSNLVRHQRTHEEKSYGCVECGKGFTLREYLMKHQRTHLGKRPYVCSECWKTFSQRHHLEVHQRSHTGEKPHKCGDCWKSFSRRQHLQVHRRTHTGEKPYTCECGKSFSRN

SEQ ID NO: 8 - DNA, 52 bp, Homo sapiens
cggatagcactggcgaccctagcgggtgagaggcccttcagggccgcggcgg

SEQ ID NO: 9 - DNA, 127 bp, Homo sapiens
gttgagcgcaccatcacatctaagccatcagcaagtttgttggttttaatctccaaaatacgtcttgattttgtctgactctttgccaccaccctgatctaagcccttatcatctgcttgaatcact

SEQ ID NO: 10 - DNA, 85 bp, Homo sapiens
aacttgtctccacttgcagtttttaaaagagttgcttccatttgactttttctgtctgctgtaccaacatatgagtttcaggagg

SEQ ID NO: 11 - DNA, 433 bp, Homo sapiens
ggtcattgatgcagtcattctcagtctcctcggagggagtctgaagatgcttaaagagcatccagagatggcggaagctcctcagcagcagttgggtattcctgtggtgaaactggagaaagagttgccatggggcagaggaagggaggaccctagtccagagacttttcggctgaggtttcggcagttccgctaccaggaggcagctggaccccaggaagctcttagggggctccaggagctctgtcgtcggtggctgaggcccgagttgcacaccaaggagcagatcctggagctgctggtgctggagcagttcctcactatcctgccccgcgagttctacgcctggatccgggagcatggcccagagagtggcaaggccctggccgccatggtggaggacctgacagaaagagcactggaggccaaggcg

SEQ ID NO: 12 - DNA, 202 bp, Homo sapiens
gttccatgccacaggcagggagagcaggaggaaacagcactttgcagaggcgcttgggagccaggcatccagctggggccagtggaggttaagcctgaatgggggatgccccctggggaaggagttcaaggtccagacccaggtaccgaggagcagctcagtcaggaccctggagatgagacacgggccttccaggagcaag

SEQ ID NO: 13 - DNA, 92 bp, Homo sapiens
cactacctgttctgcaggcgggtcctggcctccccgcagtgaatcccagagaccaagagatggcagctgggttctttactgctggatcgcag

SEQ ID NO: 14 - DNA, 124 bp, Homo sapiens
gggttggggccatttaaagatatggccctggccttccctgaggaggagtggaggcatgtgaccccagcccagatagactgctttggggagtatgtggaaccgcaggactgcagggtctctccag

SEQ ID NO: 15 - DNA, 866 bp, Homo sapiens
gcggtgggagcaaggaaaaggaggcaaaacccccacaggaagacctgaaaggggcgctggtggcactgacatcagagaggtttggggaagcctctctccagggccctgggctcggaagggtctgtgagcaggagcctggtggccctgcaggcagtgcgcctgggcttcctcctccccagcacggtgccatccccctgcctgacgaagtcaaaacccacagctccttctggaagcctttccagtgccctgagtgtgggaaaggattcagtcggagctccaatctcgtcaggcaccagcgaacccacgaagagaagtcttatggctgtgtggagtgtgggaagggctttaccctgagagagtacctgatgaagcaccagagaacccacctgggaaagaggccctacgtgtgcagcgagtgctggaaaaccttcagccagagacaccacctggaggtgcaccagcgcagccacactggggagaagccccacaagtgcggggactgctggaagagcttcagccgcaggcagcacctgcaggtgcaccggaggacgcacaccggggagaagccctacacctgcgagtgtggcaagagcttcagcaggaatgccaatctggcggtgcaccggcgtgcccacactggcgagaagccatatgggtgccaggtgtgcgggaagcggttcagcaaaggggagcggctggtccgacaccagagaatccatacaggggagaagccctaccactgtcctgcctgcgggcgaagcttcaaccagaggtccatcctcaaccggcaccagaagacccagcaccgccaggagccgctggtgcagtgagcatagcaggtggcaggcagcaccatcattcatctt

SEQ ID NO: 16 - DNA, 500 bp, Homo sapiens
ggcacggaagtggaaggggcctagccacagagcgcctcgagctgggcagtcaatcctggggaagccctggtggtcttcgcctcgccgggttcggaacagcaggctgggatcagcaaccatcgagacgcatccgccgagacctccgagcatcctagagaggacacggaagcgagtctttccttacgcacctgtctaacagcgtccgcagctcacttccggaccgcggatagcactggcgaccctagcgggtgagaggcccttcagggccgcggcgggtgagagcctcttcagggccgcagcgggtggcgggcgaagtggtaaacgggcgcggggacgggttttggtgccgctacggggctcggcggcagcggggttgcagtagagcccgtctccctccgctcagccccggctgagggcggcaagtctctcaggagctgccttcagcggccccgaggccctgcgggtctggacgctgaggggccgccgcgctgtaggctcag

SEQ ID NO: 17 - DNA, 500 bp, Homo sapiens
gttatcatctagtctcttttttttcttctgagaagtaggaggagtagcactcatcctacagaagtgttttaagtattagatgaaatatgtgttcacatgctttctaaagagtaaagcctgtacaagttagaaatctttaggtcatttgtcataatggtatatatgttgctccattgtctttttcaggttgagcgcaccatcacatctaagccatcagcaagtttgttggttttaatctccaaaatacgtcttgattttgtctgactctttgccaccaccctgatctaagcccttatcatctgcttgaatcactgtaagtgccatttccctcttgccacctctagcctattccctgtcaacacacaggcagaatgacttttataaaacatgtagttcctcgctaaagtaagaaataagaataaagttcataattctttctgtggcgcaggctctgggtgatctggtttctgtctgcctctgccacctcttctggtgcagct

SEQ ID NO: 18 - DNA, 500 bp, Homo sapiens
gctcgtcactgctgaagccacactgggatatggcttgttcttggacacccagagtaatttcttagcctcagggcttttgcctggaatgctcttagaatgactgactcattctcatccttgagtcagcctggtatcatgtctttagaaaagccttcttcaagtcagttgccccctgttaacagagcaccctacttattttctttctagaacttgtctccacttgcagtttttaaaagagttgcttccatttgactttttctgtctgctgtaccagcatatgagtttcaggagggtaagctcccagtgtgtcttgttttctattttatttgttgtttctgcctgcctcttgtgtgtgtatatgtgtgtgtttgtgtgttgcatgtatgtttcctttagtattggaagagtaggccctggtgactcacccagttataacccattatatattattctctgattgtagtgttattctccagtgagatcctaagttatttgtgggt

SEQ ID NO: 19 - DNA, 500 bp, Homo sapiens
gctgacctttcatgtgtctcttgttctcaaaagggtcattgatgcagtcattctcagtctcctcggagggagtctgaagatgcttaaagagcatccagagatggcggaagctcctcagcagcagttgggtattcctgtggtgaaactggagaaagagttgccatggggcagaggaagggaggaccctagtccagagacttttcggctgaggtttcggcagttccgctaccaggaggcagctggaccccaggaagctcttagggagctccaggagctctgtcgtcggtggctgaggcccgagttgcacaccaaggagcagatcctggagctgctggtgctggagcagttcctcactatcctgccccgcgagttctacgcctggatccgggagcatggcccagagagtggcaaggccctggccgccatggtggaggacctgacagaaagagcactggaggccaaggcggtgggtgaggaggggatccaggtctggcgccctt

SEQ ID NO: 20 - DNA, 500 bp, Homo sapiens
ctggggaagagctcagctgatttttccttcctctcccctgaagctggaatggttcttttcttggttctctttttagattttagttcaactcccttcataacagccttgcccaggcctcattctaatcggtgttgggaactgttcttaggttccatgccacaggcagggagagcaggaggaaacagcactttgcagaggcgcttgggagccaggcatccagctggggccagtggaggtcaagcctgaatgggggatgccccctggggaaggagttcaaggtccagacccaggtaccgaggagcagctcagtcaggaccctggagatgagacacgggccttccaggagcaaggtgagtaagacgcagatagtggggatgtcaggtcataggaaacagtgctgtgcagccaactctcttcagaaacccagcaatggagcaactaagttacccacgaggtgtaattgtgaattttcttggctacttcctccaccttaggaaata

SEQ ID NO: 21 - DNA, 500 bp, Homo sapiens
cccaggccccagctgagaatagggcaagggacacccaggcccctgtgcatgggaaagtgtggtaccagagtgaaaagggattctgtctggagtcttctggttcctgaggttgtgagcatctggtaggggacacatttgaacgagctaacagcataacatcactgatccttctgatctttctcatgctttttgtccctgctcagcactacctgttctgcaggcgggtcctggcctccccgcagtgaatcccagagaccaagagatggcagctgggttctttactgctggatcgcaggtgagctctgactccctttgcagaaatcatgaccgttgctttgattgaggttcaccttccccaaggtttctctgcacaacagtgttcccttcccgccccaagttgagtcattctcccttcctagtcccggtggacctgatggtgtggtttcctccactgaaccatcagccgcagttgttaatttacatcgaaccttatgtctgtc

SEQ ID NO: 22 - DNA, 500 bp, Homo sapiens
cttagttgttaggggcaagctgagccccagccacagaggctcacaactgcagtggctcaaacaagtggattactcccattcaactgttgggaggaagctggttgggaggaagttggattacagacatgagccactgtctctggcctaggattctttctttattcatagcaatctcctattgttgcaggggttggggccatttaaagatatggccctggccttccctgaggaggagtggaggcatgtgaccccagcccagatagactgctttggggagtatgtggaaccgcaggactgcagggtctctccaggtaagactgtctccacccacaggtgaggaactggggagttctgaaagctcaggtcaggggtcctgccgtagctctggcgctcctggcaaaggaaggggacttcatggcaggcgggtaaatgggtccagcacggaccatggggcacgaggagctgctttcctgtgtcaatagaggagccaaatgatggag

SEQ ID NO: 23 - DNA, 500 bp, Homo sapiens
tgccatccccctgcctgacgaagtcaaaacccacagctccttctggaagcctttccagtgccctgagtgtgggaaaggattcagtcggagctccaatctcgtcaggcaccagcgaacccacgaagagaagtcttatggctgtgtggagtgtgggaagggctttaccctgagagaatacctgatgaagcaccagagaacccacctgggaaagaggccctacgtgtgcagcgagtgctggaaaaccttcagccagagacaccacctggaggtgcaccagcgcagccacactggggagaagccctacaagtgcggggactgctggaagagcttcagccgcaggcagcacctgcaggtgcaccggaggacgcacaccggggagaagccctacacctgcgagtgtggcaagagcttcagcaggaatgccaatctggcggtgcaccggcgtgcccacactggcgagaagccatatgggtgccaggtgtgcgggaagcggttcagca

SEQ ID NO: 24 - DNA, 1000 bp, Homo sapiens
ggaggataaagtgagatggtctaacacctatgttatattctaggagttcatttactctataagtgtatatttttagcaaatattgtaccagacactttgcaaagtgctggagaagagtaagacaagagggtttcctgtttcctgagtggattctggagtaacactgggccacccagttgagacagactgccttcaggctggacgcggtggcttgcgcctgcagtcctagcactttgggaggccaaggggggaagatcgcttgagtccagaagttggagaccagattgggcaacatagagagatccccctctctgcaaaaaattgaaaaaaagtcccagctacccaggagactgaggtgggaggattgcttgaactcagggcttcgaggttgcagtgagctatgatctcaccactgcactccatcctgggagacagaacaagacttctctctctctttctcaaaaaacacaaacaaacaaacaaacaaaaaccccccacaaaaaacagctccgatgctggctcctccaggaagccttccctgactacacatacacacacgcacgcacactacccggggtcaggagcctcttaagtgagccggttagatccagtgcgccccctatctcctctgcccctacgcctcgcgcaaggccctcgcagccggaatagtcgcgcattgaccgactggactctaaagccccttggggcaggtgctgtgtccagtagtgtatctggcgatgcaccgagtcctttccacggagggcaagcaggtgaaatggcacggaagtggaaggggcctagccacagagcgcctcgagctgggcagtcaatcctggggaagccctggtggtcttcgcctcgccgggttcggaacagcaggctgggatcagcaaccatcgagacgcatccgccgagacctccgagcatcctagagaggacacggaagcgagtctttccttacgcacctgtctaacagcgtccgcagctcacttccggaccg

SEQ ID NO: 25 - DNA, 17 bp, Homo sapiens
tttaaaagagttgcttc

SEQ ID NO: 26 - DNA, 17 bp, Homo sapiens
ttaaaagagttgcttcc

SEQ ID NO: 27 - DNA, 17 bp, Homo sapiens
taaaagagttgcttcca

SEQ ID NO: 28 - DNA, 17 bp, Homo sapiens
aaaagagttgcttccat

SEQ ID NO: 29 - DNA, 17 bp, Homo sapiens
aaagagttgcttccatt

SEQ ID NO: 30 - DNA, 17 bp, Homo sapiens
aagagttgcttccattt

SEQ ID NO: 31 - DNA, 17 bp, Homo sapiens
agagttgcttccatttg

SEQ ID NO: 32 - DNA, 17 bp, Homo sapiens
gagttgcttccatttga

SEQ ID NO: 33 - DNA, 17 bp, Homo sapiens
agttgcttccatttgac

SEQ ID NO: 34 - DNA, 17 bp, Homo sapiens
gttgcttccatttgact

SEQ ID NO: 35 - DNA, 17 bp, Homo sapiens
ttgcttccatttgactt

SEQ ID NO: 36 - DNA, 17 bp, Homo sapiens
tgcttccatttgacttt

SEQ ID NO: 37 - DNA, 17 bp, Homo sapiens
gcttccatttgactttt

SEQ ID NO: 38 - DNA, 17 bp, Homo sapiens
cttccatttgacttttt

SEQ ID NO: 39 - DNA, 17 bp, Homo sapiens
ttccatttgactttttc

SEQ ID NO: 40 - DNA, 17 bp, Homo sapiens
tccatttgactttttct

SEQ ID NO: 41 - DNA, 17 bp, Homo sapiens
ccatttgactttttctg

SEQ ID NO: 42 - DNA, 17 bp, Homo sapiens
catttgactttttctgt

SEQ ID NO: 43 - DNA, 17 bp, Homo sapiens
atttgactttttctgtc

SEQ ID NO: 44 - DNA, 17 bp, Homo sapiens
tttgactttttctgtct

SEQ ID NO: 45 - DNA, 17 bp, Homo sapiens
ttgactttttctgtctg

SEQ ID NO: 46 - DNA, 17 bp, Homo sapiens
tgactttttctgtctgc

SEQ ID NO: 47 - DNA, 17 bp, Homo sapiens
gactttttctgtctgct

SEQ ID NO: 48 - DNA, 17 bp, Homo sapiens
actttttctgtctgctg

SEQ ID NO: 49 - DNA, 17 bp, Homo sapiens
ctttttctgtctgctgt

SEQ ID NO: 50 - DNA, 17 bp, Homo sapiens
tttttctgtctgctgta

SEQ ID NO: 51 - DNA, 17 bp, Homo sapiens
ttttctgtctgctgtac

SEQ ID NO: 52 - DNA, 17 bp, Homo sapiens
tttctgtctgctgtacc

SEQ ID NO: 53 - DNA, 17 bp, Homo sapiens
ttctgtctgctgtacca

SEQ ID NO: 54 - DNA, 17 bp, Homo sapiens
tctgtctgctgtaccaa

SEQ ID NO: 55 - DNA, 17 bp, Homo sapiens
ctgtctgctgtaccaac

SEQ ID NO: 56 - DNA, 17 bp, Homo sapiens
tgtctgctgtaccaaca

SEQ ID NO: 57 - DNA, 17 bp, Homo sapiens
gtctgctgtaccaacat

SEQ ID NO: 58 - DNA, 17 bp, Homo sapiens
tctgctgtaccaacata

SEQ ID NO: 59 - DNA, 17 bp, Homo sapiens
ctgctgtaccaacatat

SEQ ID NO: 60 - DNA, 17 bp, Homo sapiens
tgctgtaccaacatatg

SEQ ID NO: 61 - DNA, 17 bp, Homo sapiens
gctgtaccaacatatga

SEQ ID NO: 62 - DNA, 17 bp, Homo sapiens
ctgtaccaacatatgag

SEQ ID NO: 63 - DNA, 17 bp, Homo sapiens
tgtaccaacatatgagt

SEQ ID NO: 64 - DNA, 17 bp, Homo sapiens
gtaccaacatatgagtt

SEQ ID NO: 65 - DNA, 17 bp, Homo sapiens
taccaacatatgagttt

SEQ ID NO: 66 - DNA, 17 bp, Homo sapiens
accaacatatgagtttc

SEQ ID NO: 67 - DNA, 17 bp, Homo sapiens
ccaacatatgagtttca

SEQ ID NO: 68 - DNA, 17 bp, Homo sapiens
caacatatgagtttcag

SEQ ID NO: 69 - DNA, 17 bp, Homo sapiens
aacatatgagtttcagg

SEQ ID NO: 70 - DNA, 17 bp, Homo sapiens
acatatgagtttcagga

SEQ ID NO: 71 - DNA, 17 bp, Homo sapiens
catatgagtttcaggag

SEQ ID NO: 72 - DNA, 17 bp, Homo sapiens
atatgagtttcaggagg

SEQ ID NO: 73 - DNA, 17 bp, Homo sapiens
tatgagtttcaggaggg

SEQ ID NO: 74 - DNA, 17 bp, Homo sapiens
atgagtttcaggagggg

SEQ ID NO: 75 - DNA, 17 bp, Homo sapiens
tgagtttcaggaggggt

SEQ ID NO: 76 - DNA, 17 bp, Homo sapiens
gagtttcaggaggggtc

SEQ ID NO: 77 - DNA, 17 bp, Homo sapiens
agtttcaggaggggtca

SEQ ID NO: 78 - DNA, 17 bp, Homo sapiens
gtttcaggaggggtcat

SEQ ID NO: 79 - DNA, 17 bp, Homo sapiens
tttcaggaggggtcatt

SEQ ID NO: 80 - DNA, 17 bp, Homo sapiens
ttcaggaggggtcattg

SEQ ID NO: 81 - DNA, 17 bp, Homo sapiens
tcaggaggggtcattga

SEQ ID NO: 82 - DNA, 17 bp, Homo sapiens
caggaggggtcattgat

SEQ ID NO: 83 - DNA, 17 bp, Homo sapiens
aggaggggtcattgatg

SEQ ID NO: 84 - DNA, 17 bp, Homo sapiens
ggaggggtcattgatgc

SEQ ID NO: 85 - DNA, 17 bp, Homo sapiens
gaggggtcattgatgca

SEQ ID NO: 86 - DNA, 17 bp, Homo sapiens
aggggtcattgatgcag

SEQ ID NO: 87 - DNA, 17 bp, Homo sapiens
ggggtcattgatgcagt

SEQ ID NO: 88 - DNA, 17 bp, Homo sapiens
gggtcattgatgcagtc

SEQ ID NO: 89 - DNA, 17 bp, Homo sapiens
ggtcattgatgcagtca

SEQ ID NO: 90 - DNA, 17 bp, Homo sapiens
gtcattgatgcagtcat

SEQ ID NO: 91 - DNA, 17 bp, Homo sapiens
tcattgatgcagtcatt

SEQ ID NO: 92 - DNA, 17 bp, Homo sapiens
cattgatgcagtcattc

SEQ ID NO: 93 - DNA, 17 bp, Homo sapiens
attgatgcagtcattct

SEQ ID NO: 94 - DNA, 17 bp, Homo sapiens
ttgatgcagtcattctc

SEQ ID NO: 95 - DNA, 17 bp, Homo sapiens
tgatgcagtcattctca

SEQ ID NO: 96 - DNA, 17 bp, Homo sapiens
gatgcagtcattctcag

SEQ ID NO: 97 - DNA, 17 bp, Homo sapiens
atgcagtcattctcagt

SEQ ID NO: 98 - DNA, 17 bp, Homo sapiens
tgcagtcattctcagtc

SEQ ID NO: 99 - DNA, 17 bp, Homo sapiens
gcagtcattctcagtct

SEQ ID NO: 100 - DNA, 17 bp, Homo sapiens
cagtcattctcagtctc

SEQ ID NO: 101 - DNA, 17 bp, Homo sapiens
agtcattctcagtctcc

SEQ ID NO: 102 - DNA, 17 bp, Homo sapiens
gtcattctcagtctcct

SEQ ID NO: 103 - DNA, 17 bp, Homo sapiens
tcattctcagtctcctc

SEQ ID NO: 104 - DNA, 17 bp, Homo sapiens
cattctcagtctcctcg

SEQ ID NO: 105 - DNA, 17 bp, Homo sapiens
attctcagtctcctcgg

SEQ ID NO: 106 - DNA, 17 bp, Homo sapiens
ttctcagtctcctcgga

SEQ ID NO: 107 - DNA, 17 bp, Homo sapiens
tctcagtctcctcggag

SEQ ID NO: 108 - DNA, 17 bp, Homo sapiens
ctcagtctcctcggagg

SEQ ID NO: 109 - DNA, 17 bp, Homo sapiens
tcagtctcctcggaggg

SEQ ID NO: 110 - DNA, 17 bp, Homo sapiens
cagtctcctcggaggga

SEQ ID NO: 111 - DNA, 17 bp, Homo sapiens
agtctcctcggagggag

SEQ ID NO: 112 - DNA, 17 bp, Homo sapiens
gtctcctcggagggagt

SEQ ID NO: 113 - DNA, 17 bp, Homo sapiens
tctcctcggagggagtc

SEQ ID NO: 114 - DNA, 17 bp, Homo sapiens
ctcctcggagggagtct

SEQ ID NO: 115 - DNA, 17 bp, Homo sapiens
tcctcggagggagtctg

SEQ ID NO: 116 - DNA, 17 bp, Homo sapiens
cctcggagggagtctga

SEQ ID NO: 117 - DNA, 17 bp, Homo sapiens
ctcggagggagtctgaa

SEQ ID NO: 118 - DNA, 17 bp, Homo sapiens
tcggagggagtctgaag

SEQ ID NO: 119 - DNA, 17 bp, Homo sapiens
cggagggagtctgaaga

SEQ ID NO: 120 - DNA, 17 bp, Homo sapiens
ggagggagtctgaagat

SEQ ID NO: 121 - DNA, 17 bp, Homo sapiens
gagggagtctgaagatg

SEQ ID NO: 122 - DNA, 17 bp, Homo sapiens
agggagtctgaagatgc

SEQ ID NO: 123 - DNA, 17 bp, Homo sapiens
gggagtctgaagatgct

SEQ ID NO: 124 - DNA, 17 bp, Homo sapiens
ggagtctgaagatgctt

SEQ ID NO: 125 - DNA, 17 bp, Homo sapiens
gagtctgaagatgctta

SEQ ID NO: 126 - DNA, 17 bp, Homo sapiens
agtctgaagatgcttaa

SEQ ID NO: 127 - DNA, 17 bp, Homo sapiens
gtctgaagatgcttaaa

SEQ ID NO: 128 - DNA, 17 bp, Homo sapiens
tctgaagatgcttaaag

SEQ ID NO: 129 - DNA, 17 bp, Homo sapiens
ctgaagatgcttaaaga

SEQ ID NO: 130 - DNA, 17 bp, Homo sapiens
tgaagatgcttaaagag

SEQ ID NO: 131 - DNA, 17 bp, Homo sapiens
gaagatgcttaaagagc

SEQ ID NO: 132 - DNA, 17 bp, Homo sapiens
aagatgcttaaagagca

SEQ ID NO: 133 - DNA, 17 bp, Homo sapiens
agatgcttaaagagcat

SEQ ID NO: 134 - DNA, 17 bp, Homo sapiens
gatgcttaaagagcatc

SEQ ID NO: 135 - DNA, 17 bp, Homo sapiens
atgcttaaagagcatcc

SEQ ID NO: 136 - DNA, 17 bp, Homo sapiens
tgcttaaagagcatcca

SEQ ID NO: 137 - DNA, 17 bp, Homo sapiens
gcttaaagagcatccag

SEQ ID NO: 138 - DNA, 17 bp, Homo sapiens
cttaaagagcatccaga

SEQ ID NO: 139 - DNA, 17 bp, Homo sapiens
ttaaagagcatccagag

SEQ ID NO: 140 - DNA, 17 bp, Homo sapiens
taaagagcatccagaga

SEQ ID NO: 141 - DNA, 17 bp, Homo sapiens
aaagagcatccagagat

SEQ ID NO: 142 - DNA, 17 bp, Homo sapiens
aagagcatccagagatg

SEQ ID NO: 143 - DNA, 17 bp, Homo sapiens
agagcatccagagatgg

SEQ ID NO: 144 - DNA, 17 bp, Homo sapiens
gagcatccagagatggc

SEQ ID NO: 145 - DNA, 17 bp, Homo sapiens
agcatccagagatggcg

SEQ ID NO: 146 - DNA, 17 bp, Homo sapiens
gcatccagagatggcgg

SEQ ID NO: 147 - DNA, 17 bp, Homo sapiens
catccagagatggcgga

SEQ ID NO: 148 - DNA, 17 bp, Homo sapiens
atccagagatggcggaa

SEQ ID NO: 149 - DNA, 17 bp, Homo sapiens
tccagagatggcggaag

SEQ ID NO: 150 - DNA, 17 bp, Homo sapiens
ccagagatggcggaagc

SEQ ID NO: 151 - DNA, 17 bp, Homo sapiens
cagagatggcggaagct

SEQ ID NO: 152 - DNA, 17 bp, Homo sapiens
agagatggcggaagctc

SEQ ID NO: 153 - DNA, 17 bp, Homo sapiens
gagatggcggaagctcc

SEQ ID NO: 154 - DNA, 17 bp, Homo sapiens
agatggcggaagctcct

SEQ ID NO: 155 - DNA, 17 bp, Homo sapiens
gatggcggaagctcctc

SEQ ID NO: 156 - DNA, 17 bp, Homo sapiens
atggcggaagctcctca

SEQ ID NO: 157 - DNA, 17 bp, Homo sapiens
tggcggaagctcctcag

SEQ ID NO: 158 - DNA, 17 bp, Homo sapiens
ggcggaagctcctcagc

SEQ ID NO: 159 - DNA, 17 bp, Homo sapiens
gcggaagctcctcagca

SEQ ID NO: 160 - DNA, 17 bp, Homo sapiens
cggaagctcctcagcag

SEQ ID NO: 161 - DNA, 17 bp, Homo sapiens
ggaagctcctcagcagc

SEQ ID NO: 162 - DNA, 17 bp, Homo sapiens
gaagctcctcagcagca

SEQ ID NO: 163 - DNA, 17 bp, Homo sapiens
aagctcctcagcagcag

SEQ ID NO: 164 - DNA, 17 bp, Homo sapiens
agctcctcagcagcagt

SEQ ID NO: 165 - DNA, 17 bp, Homo sapiens
gctcctcagcagcagtt

SEQ ID NO: 166 - DNA, 17 bp, Homo sapiens
ctcctcagcagcagttg

SEQ ID NO: 167 - DNA, 17 bp, Homo sapiens
tcctcagcagcagttgg

SEQ ID NO: 168 - DNA, 17 bp, Homo sapiens
cctcagcagcagttggg

SEQ ID NO: 169 - DNA, 17 bp, Homo sapiens
ctcagcagcagttgggt

SEQ ID NO: 170 - DNA, 17 bp, Homo sapiens
tcagcagcagttgggta

SEQ ID NO: 171 - DNA, 17 bp, Homo sapiens
cagcagcagttgggtat

SEQ ID NO: 172 - DNA, 17 bp, Homo sapiens
agcagcagttgggtatt

SEQ ID NO: 173 - DNA, 17 bp, Homo sapiens
gcagcagttgggtattc

SEQ ID NO: 174 - DNA, 17 bp, Homo sapiens
cagcagttgggtattcc

SEQ ID NO: 175 - DNA, 17 bp, Homo sapiens
agcagttgggtattcct

SEQ ID NO: 176 - DNA, 17 bp, Homo sapiens
gcagttgggtattcctg

SEQ ID NO: 177 - DNA, 17 bp, Homo sapiens
cagttgggtattcctgt

SEQ ID NO: 178 - DNA, 17 bp, Homo sapiens
agttgggtattcctgtg

SEQ ID NO: 179 - DNA, 17 bp, Homo sapiens
gttgggtattcctgtgg

SEQ ID NO: 180 - DNA, 17 bp, Homo sapiens
ttgggtattcctgtggt

SEQ ID NO: 181 - DNA, 17 bp, Homo sapiens
tgggtattcctgtggtg

SEQ ID NO: 182 - DNA, 17 bp, Homo sapiens
gggtattcctgtggtga

SEQ ID NO: 183 - DNA, 17 bp, Homo sapiens
ggtattcctgtggtgaa

SEQ ID NO: 184 - DNA, 17 bp, Homo sapiens
gtattcctgtggtgaaa

SEQ ID NO: 185 - DNA, 17 bp, Homo sapiens
tattcctgtggtgaaac

SEQ ID NO: 186 - DNA, 17 bp, Homo sapiens
attcctgtggtgaaact

SEQ ID NO: 187 - DNA, 17 bp, Homo sapiens
ttcctgtggtgaaactg

SEQ ID NO: 188 - DNA, 17 bp, Homo sapiens
tcctgtggtgaaactgg

SEQ ID NO: 189 - DNA, 17 bp, Homo sapiens
cctgtggtgaaactgga

SEQ ID NO: 190 - DNA, 17 bp, Homo sapiens
ctgtggtgaaactggag

SEQ ID NO: 191 - DNA, 17 bp, Homo sapiens
tgtggtgaaactggaga

SEQ ID NO: 192 - DNA, 17 bp, Homo sapiens
gtggtgaaactggagaa

SEQ ID NO: 193 - DNA, 17 bp, Homo sapiens
tggtgaaactggagaaa

SEQ ID NO: 194 - DNA, 17 bp, Homo sapiens
ggtgaaactggagaaag

SEQ ID NO: 195 - DNA, 17 bp, Homo sapiens
gtgaaactggagaaaga

SEQ ID NO: 196 - DNA, 17 bp, Homo sapiens
tgaaactggagaaagag

SEQ ID NO: 197 - DNA, 17 bp, Homo sapiens
gaaactggagaaagagt

SEQ ID NO: 198 - DNA, 17 bp, Homo sapiens
aaactggagaaagagtt

SEQ ID NO: 199 - DNA, 17 bp, Homo sapiens
aactggagaaagagttg

SEQ ID NO: 200 - DNA, 17 bp, Homo sapiens
actggagaaagagttgc

SEQ ID NO: 201 - DNA, 17 bp, Homo sapiens
ctggagaaagagttgcc

SEQ ID NO: 202 - DNA, 17 bp, Homo sapiens
tggagaaagagttgcca

SEQ ID NO: 203 - DNA, 17 bp, Homo sapiens
ggagaaagagttgccat

SEQ ID NO: 204 - DNA, 17 bp, Homo sapiens
gagaaagagttgccatg

SEQ ID NO: 205 - DNA, 17 bp, Homo sapiens
agaaagagttgccatgg

SEQ ID NO: 206 - DNA, 17 bp, Homo sapiens
gaaagagttgccatggg

SEQ ID NO: 207 - DNA, 17 bp, Homo sapiens
aaagagttgccatgggg

SEQ ID NO: 208 - DNA, 17 bp, Homo sapiens
aagagttgccatggggc

SEQ ID NO: 209 - DNA, 17 bp, Homo sapiens
agagttgccatggggca

SEQ ID NO: 210 - DNA, 17 bp, Homo sapiens
gagttgccatggggcag

SEQ ID NO: 211 - DNA, 17 bp, Homo sapiens
agttgccatggggcaga

SEQ ID NO: 212 - DNA, 17 bp, Homo sapiens
gttgccatggggcagag

SEQ ID NO: 213 - DNA, 17 bp, Homo sapiens
ttgccatggggcagagg

SEQ ID NO: 214 - DNA, 17 bp, Homo sapiens
tgccatggggcagagga

SEQ ID NO: 215 - DNA, 17 bp, Homo sapiens
gccatggggcagaggaa

SEQ ID NO: 216 - DNA, 17 bp, Homo sapiens
ccatggggcagaggaag

SEQ ID NO: 217 - DNA, 17 bp, Homo sapiens
catggggcagaggaagg

SEQ ID NO: 218 - DNA, 17 bp, Homo sapiens
atggggcagaggaaggg

SEQ ID NO: 219 - DNA, 17 bp, Homo sapiens
tggggcagaggaaggga

SEQ ID NO: 220 - DNA, 17 bp, Homo sapiens
ggggcagaggaagggag

SEQ ID NO: 221 - DNA, 17 bp, Homo sapiens
gggcagaggaagggagg

SEQ ID NO: 222 - DNA, 17 bp, Homo sapiens
ggcagaggaagggagga

SEQ ID NO: 223 - DNA, 17 bp, Homo sapiens
gcagaggaagggaggac

SEQ ID NO: 224 - DNA, 17 bp, Homo sapiens
cagaggaagggaggacc

SEQ ID NO: 225 - DNA, 17 bp, Homo sapiens
agaggaagggaggaccc

SEQ ID NO: 226 - DNA, 17 bp, Homo sapiens
gaggaagggaggaccct

SEQ ID NO: 227 - DNA, 17 bp, Homo sapiens
aggaagggaggacccta

SEQ ID NO: 228 - DNA, 17 bp, Homo sapiens
ggaagggaggaccctag

SEQ ID NO: 229 - DNA, 17 bp, Homo sapiens
gaagggaggaccctagt

SEQ ID NO: 230 - DNA, 17 bp, Homo sapiens
aagggaggaccctagtc

SEQ ID NO: 231 - DNA, 17 bp, Homo sapiens
agggaggaccctagtcc

SEQ ID NO: 232 - DNA, 17 bp, Homo sapiens
gggaggaccctagtcca

SEQ ID NO: 233 - DNA, 17 bp, Homo sapiens
ggaggaccctagtccag

SEQ ID NO: 234 - DNA, 17 bp, Homo sapiens
gaggaccctagtccaga

SEQ ID NO: 235 - DNA, 17 bp, Homo sapiens
aggaccctagtccagag

SEQ ID NO: 236 - DNA, 17 bp, Homo sapiens
ggaccctagtccagaga

SEQ ID NO: 237 - DNA, 17 bp, Homo sapiens
gaccctagtccagagac

SEQ ID NO: 238 - DNA, 17 bp, Homo sapiens
accctagtccagagact

SEQ ID NO: 239 - DNA, 17 bp, Homo sapiens
ccctagtccagagactt

SEQ ID NO: 240 - DNA, 17 bp, Homo sapiens
cctagtccagagacttt

SEQ ID NO: 241 - DNA, 17 bp, Homo sapiens
ctagtccagagactttt

SEQ ID NO: 242 - DNA, 17 bp, Homo sapiens
tagtccagagacttttc

SEQ ID NO: 243 - DNA, 17 bp, Homo sapiens
agtccagagacttttcg

SEQ ID NO: 244 - DNA, 17 bp, Homo sapiens
gtccagagacttttcgg

SEQ ID NO: 245 - DNA, 17 bp, Homo sapiens
tccagagacttttcggc

SEQ ID NO: 246 - DNA, 17 bp, Homo sapiens
ccagagacttttcggct

SEQ ID NO: 247 - DNA, 17 bp, Homo sapiens
cagagacttttcggctg

SEQ ID NO: 248 - DNA, 17 bp, Homo sapiens
agagacttttcggctga

SEQ ID NO: 249 - DNA, 17 bp, Homo sapiens
gagacttttcggctgag

SEQ ID NO: 250 - DNA, 17 bp, Homo sapiens
agacttttcggctgagg

SEQ ID NO: 251 - DNA, 17 bp, Homo sapiens
gacttttcggctgaggt

SEQ ID NO: 252 - DNA, 17 bp, Homo sapiens
acttttcggctgaggtt

SEQ ID NO: 253 - DNA, 17 bp, Homo sapiens
cttttcggctgaggttt

SEQ ID NO: 254 - DNA, 17 bp, Homo sapiens
ttttcggctgaggtttc

SEQ ID NO: 255 - DNA, 17 bp, Homo sapiens
tttcggctgaggtttcg

SEQ ID NO: 256 - DNA, 17 bp, Homo sapiens
ttcggctgaggtttcgg

SEQ ID NO: 257 - DNA, 17 bp, Homo sapiens
tcggctgaggtttcggc

SEQ ID NO: 258 - DNA, 17 bp, Homo sapiens
cggctgaggtttcggca

SEQ ID NO: 259 - DNA, 17 bp, Homo sapiens
ggctgaggtttcggcag

SEQ ID NO: 260 - DNA, 17 bp, Homo sapiens
gctgaggtttcggcagt

SEQ ID NO: 261 - DNA, 17 bp, Homo sapiens
ctgaggtttcggcagtt

SEQ ID NO: 262 - DNA, 17 bp, Homo sapiens
tgaggtttcggcagttc

SEQ ID NO: 263 - DNA, 17 bp, Homo sapiens
gaggtttcggcagttcc

SEQ ID NO: 264 - DNA, 17 bp, Homo sapiens
aggtttcggcagttccg

SEQ ID NO: 265 - DNA, 17 bp, Homo sapiens
ggtttcggcagttccgc

SEQ ID NO: 266 - DNA, 17 bp, Homo sapiens
gtttcggcagttccgct

SEQ ID NO: 267 - DNA, 17 bp, Homo sapiens
tttcggcagttccgcta

SEQ ID NO: 268 - DNA, 17 bp, Homo sapiens
ttcggcagttccgctac

SEQ ID NO: 269 - DNA, 17 bp, Homo sapiens
tcggcagttccgctacc

SEQ ID NO: 270 - DNA, 17 bp, Homo sapiens
cggcagttccgctacca

SEQ ID NO: 271 - DNA, 17 bp, Homo sapiens
ggcagttccgctaccag

SEQ ID NO: 272 - DNA, 17 bp, Homo sapiens
gcagttccgctaccagg

SEQ ID NO: 273 - DNA, 17 bp, Homo sapiens
cagttccgctaccagga

SEQ ID NO: 274 - DNA, 17 bp, Homo sapiens
agttccgctaccaggag

SEQ ID NO: 275 - DNA, 17 bp, Homo sapiens
gttccgctaccaggagg

SEQ ID NO: 276 - DNA, 17 bp, Homo sapiens
ttccgctaccaggaggc

SEQ ID NO: 277 - DNA, 17 bp, Homo sapiens
tccgctaccaggaggca

SEQ ID NO: 278 - DNA, 17 bp, Homo sapiens
ccgctaccaggaggcag

SEQ ID NO: 279 - DNA, 17 bp, Homo sapiens
cgctaccaggaggcagc

SEQ ID NO: 280 - DNA, 17 bp, Homo sapiens
gctaccaggaggcagct

SEQ ID NO: 281 - DNA, 17 bp, Homo sapiens
ctaccaggaggcagctg

SEQ ID NO: 282 - DNA, 17 bp, Homo sapiens
taccaggaggcagctgg

SEQ ID NO: 283 - DNA, 17 bp, Homo sapiens
accaggaggcagctgga

SEQ ID NO: 284 - DNA, 17 bp, Homo sapiens
ccaggaggcagctggac

SEQ ID NO: 285 - DNA, 17 bp, Homo sapiens
caggaggcagctggacc

SEQ ID NO: 286 - DNA, 17 bp, Homo sapiens
aggaggcagctggaccc

SEQ ID NO: 287 - DNA, 17 bp, Homo sapiens
ggaggcagctggacccc

SEQ ID NO: 288 - DNA, 17 bp, Homo sapiens
gaggcagctggacccca

SEQ ID NO: 289 - DNA, 17 bp, Homo sapiens
aggcagctggaccccag

SEQ ID NO: 290 - DNA, 17 bp, Homo sapiens
ggcagctggaccccagg

SEQ ID NO: 291 - DNA, 17 bp, Homo sapiens
gcagctggaccccagga

SEQ ID NO: 292 - DNA, 17 bp, Homo sapiens
cagctggaccccaggaa

SEQ ID NO: 293 - DNA, 17 bp, Homo sapiens
agctggaccccaggaag

SEQ ID NO: 294 - DNA, 17 bp, Homo sapiens
gctggaccccaggaagc

SEQ ID NO: 295 - DNA, 17 bp, Homo sapiens
ctggaccccaggaagct

SEQ ID NO: 296 - DNA, 17 bp, Homo sapiens
tggaccccaggaagctc

SEQ ID NO: 297 - DNA, 17 bp, Homo sapiens
ggaccccaggaagctct

SEQ ID NO: 298 - DNA, 17 bp, Homo sapiens
gaccccaggaagctctt

SEQ ID NO: 299 - DNA, 17 bp, Homo sapiens
accccaggaagctctta

SEQ ID NO: 300 - DNA, 17 bp, Homo sapiens
ccccaggaagctcttag

SEQ ID NO: 301 - DNA, 17 bp, Homo sapiens
cccaggaagctcttagg

SEQ ID NO: 302 - DNA, 17 bp, Homo sapiens
ccaggaagctcttaggg

SEQ ID NO: 303 - DNA, 17 bp, Homo sapiens
caggaagctcttagggg

SEQ ID NO: 304 - DNA, 17 bp, Homo sapiens
aggaagctcttaggggg

SEQ ID NO: 305 - DNA, 17 bp, Homo sapiens
ggaagctcttagggggc

SEQ ID NO: 306 - DNA, 17 bp, Homo sapiens
gaagctcttagggggct

SEQ ID NO: 307 - DNA, 17 bp, Homo sapiens
aagctcttagggggctc

SEQ ID NO: 308 - DNA, 17 bp, Homo sapiens
agctcttagggggctcc

SEQ ID NO: 309 - DNA, 17 bp, Homo sapiens
gctcttagggggctcca

SEQ ID NO: 310 - DNA, 17 bp, Homo sapiens
ctcttagggggctccag

SEQ ID NO: 311 - DNA, 17 bp, Homo sapiens
tcttagggggctccagg

SEQ ID NO: 312 - DNA, 17 bp, Homo sapiens
cttagggggctccagga

SEQ ID NO: 313 - DNA, 17 bp, Homo sapiens
ttagggggctccaggag

SEQ ID NO: 314 - DNA, 17 bp, Homo sapiens
tagggggctccaggagc

SEQ ID NO: 315 - DNA, 17 bp, Homo sapiens
agggggctccaggagct

SEQ ID NO: 316 - DNA, 17 bp, Homo sapiens
gggggctccaggagctc

SEQ ID NO: 317 - DNA, 17 bp, Homo sapiens
ggggctccaggagctct

SEQ ID NO: 318 - DNA, 17 bp, Homo sapiens
gggctccaggagctctg

SEQ ID NO: 319 - DNA, 17 bp, Homo sapiens
ggctccaggagctctgt

SEQ ID NO: 320 - DNA, 17 bp, Homo sapiens
gctccaggagctctgtc

SEQ ID NO: 321 - DNA, 17 bp, Homo sapiens
ctccaggagctctgtcg

SEQ ID NO: 322 - DNA, 17 bp, Homo sapiens
tccaggagctctgtcgt

SEQ ID NO: 323 - DNA, 17 bp, Homo sapiens
ccaggagctctgtcgtc

SEQ ID NO: 324 - DNA, 17 bp, Homo sapiens
caggagctctgtcgtcg

SEQ ID NO: 325 - DNA, 17 bp, Homo sapiens
aggagctctgtcgtcgg

SEQ ID NO: 326 - DNA, 17 bp, Homo sapiens
ggagctctgtcgtcggt

SEQ ID NO: 327 - DNA, 17 bp, Homo sapiens
gagctctgtcgtcggtg

SEQ ID NO: 328 - DNA, 17 bp, Homo sapiens
agctctgtcgtcggtgg

SEQ ID NO: 329 - DNA, 17 bp, Homo sapiens
gctctgtcgtcggtggc

SEQ ID NO: 330 - DNA, 17 bp, Homo sapiens
ctctgtcgtcggtggct

SEQ ID NO: 331 - DNA, 17 bp, Homo sapiens
tctgtcgtcggtggctg

SEQ ID NO: 332 - DNA, 17 bp, Homo sapiens
ctgtcgtcggtggctga

SEQ ID NO: 333 - DNA, 17 bp, Homo sapiens
tgtcgtcggtggctgag

SEQ ID NO: 334 - DNA, 17 bp, Homo sapiens
gtcgtcggtggctgagg

SEQ ID NO: 335 - DNA, 17 bp, Homo sapiens
tcgtcggtggctgaggc

SEQ ID NO: 336 - DNA, 17 bp, Homo sapiens
cgtcggtggctgaggcc

SEQ ID NO: 337 - DNA, 17 bp, Homo sapiens
gtcggtggctgaggccc

SEQ ID NO: 338 - DNA, 17 bp, Homo sapiens
tcggtggctgaggcccg

SEQ ID NO: 339 - DNA, 17 bp, Homo sapiens
cggtggctgaggcccga

SEQ ID NO: 340 - DNA, 17 bp, Homo sapiens
ggtggctgaggcccgag

SEQ ID NO: 341 - DNA, 17 bp, Homo sapiens
gtggctgaggcccgagt

SEQ ID NO: 342 - DNA, 17 bp, Homo sapiens
tggctgaggcccgagtt

SEQ ID NO: 343 - DNA, 17 bp, Homo sapiens
ggctgaggcccgagttg

SEQ ID NO: 344 - DNA, 17 bp, Homo sapiens
gctgaggcccgagttgc

SEQ ID NO: 345 - DNA, 17 bp, Homo sapiens
ctgaggcccgagttgca

SEQ ID NO: 346 - DNA, 17 bp, Homo sapiens
tgaggcccgagttgcac

SEQ ID NO: 347 - DNA, 17 bp, Homo sapiens
gaggcccgagttgcaca

SEQ ID NO: 348 - DNA, 17 bp, Homo sapiens
aggcccgagttgcacac

SEQ ID NO: 349 - DNA, 17 bp, Homo sapiens
ggcccgagttgcacacc

SEQ ID NO: 350 - DNA, 17 bp, Homo sapiens
gcccgagttgcacacca

SEQ ID NO: 351 - DNA, 17 bp, Homo sapiens
cccgagttgcacaccaa

SEQ ID NO: 352 - DNA, 17 bp, Homo sapiens
ccgagttgcacaccaag

SEQ ID NO: 353 - DNA, 17 bp, Homo sapiens
cgagttgcacaccaagg

SEQ ID NO: 354 - DNA, 17 bp, Homo sapiens
gagttgcacaccaagga

SEQ ID NO: 355 - DNA, 17 bp, Homo sapiens
agttgcacaccaaggag

SEQ ID NO: 356 - DNA, 17 bp, Homo sapiens
gttgcacaccaaggagc

SEQ ID NO: 357 - DNA, 17 bp, Homo sapiens
ttgcacaccaaggagca

SEQ ID NO: 358 - DNA, 17 bp, Homo sapiens
tgcacaccaaggagcag

SEQ ID NO: 359 - DNA, 17 bp, Homo sapiens
gcacaccaaggagcaga

SEQ ID NO: 360 - DNA, 17 bp, Homo sapiens
cacaccaaggagcagat

SEQ ID NO: 361 - DNA, 17 bp, Homo sapiens
acaccaaggagcagatc

SEQ ID NO: 362 - DNA, 17 bp, Homo sapiens
caccaaggagcagatcc

SEQ ID NO: 363 - DNA, 17 bp, Homo sapiens
accaaggagcagatcct

SEQ ID NO: 364 - DNA, 17 bp, Homo sapiens
ccaaggagcagatcctg

SEQ ID NO: 365 - DNA, 17 bp, Homo sapiens
caaggagcagatcctgg

SEQ ID NO: 366 - DNA, 17 bp, Homo sapiens
aaggagcagatcctgga

SEQ ID NO: 367 - DNA, 17 bp, Homo sapiens
aggagcagatcctggag

SEQ ID NO: 368 - DNA, 17 bp, Homo sapiens
ggagcagatcctggagc

SEQ ID NO: 369 - DNA, 17 bp, Homo sapiens
gagcagatcctggagct

SEQ ID NO: 370 - DNA, 17 bp, Homo sapiens
agcagatcctggagctg

SEQ ID NO: 371 - DNA, 17 bp, Homo sapiens
gcagatcctggagctgc

SEQ ID NO: 372 - DNA, 17 bp, Homo sapiens
cagatcctggagctgct

SEQ ID NO: 373 - DNA, 17 bp, Homo sapiens
agatcctggagctgctg

SEQ ID NO: 374 - DNA, 17 bp, Homo sapiens
gatcctggagctgctgg

SEQ ID NO: 375 - DNA, 17 bp, Homo sapiens
atcctggagctgctggt

SEQ ID NO: 376 - DNA, 17 bp, Homo sapiens
tcctggagctgctggtg

SEQ ID NO: 377 - DNA, 17 bp, Homo sapiens
cctggagctgctggtgc

SEQ ID NO: 378 - DNA, 17 bp, Homo sapiens
ctggagctgctggtgct

SEQ ID NO: 379 - DNA, 17 bp, Homo sapiens
tggagctgctggtgctg

SEQ ID NO: 380 - DNA, 17 bp, Homo sapiens
ggagctgctggtgctgg

SEQ ID NO: 381 - DNA, 17 bp, Homo sapiens
gagctgctggtgctgga

SEQ ID NO: 382 - DNA, 17 bp, Homo sapiens
agctgctggtgctggag

SEQ ID NO: 383 - DNA, 17 bp, Homo sapiens
gctgctggtgctggagc

SEQ ID NO: 384 - DNA, 17 bp, Homo sapiens
ctgctggtgctggagca

SEQ ID NO: 385 - DNA, 17 bp, Homo sapiens
tgctggtgctggagcag

SEQ ID NO: 386 - DNA, 17 bp, Homo sapiens
gctggtgctggagcagt

SEQ ID NO: 387 - DNA, 17 bp, Homo sapiens
ctggtgctggagcagtt

SEQ ID NO: 388 - DNA, 17 bp, Homo sapiens
tggtgctggagcagttc

SEQ ID NO: 389 - DNA, 17 bp, Homo sapiens
ggtgctggagcagttcc

SEQ ID NO: 390 - DNA, 17 bp, Homo sapiens
gtgctggagcagttcct

SEQ ID NO: 391 - DNA, 17 bp, Homo sapiens
tgctggagcagttcctc

SEQ ID NO: 392 - DNA, 17 bp, Homo sapiens
gctggagcagttcctca

SEQ ID NO: 393 - DNA, 17 bp, Homo sapiens
ctggagcagttcctcac

SEQ ID NO: 394 - DNA, 17 bp, Homo sapiens
tggagcagttcctcact

SEQ ID NO: 395 - DNA, 17 bp, Homo sapiens
ggagcagttcctcacta

SEQ ID NO: 396 - DNA, 17 bp, Homo sapiens
gagcagttcctcactat

SEQ ID NO: 397 - DNA, 17 bp, Homo sapiens
agcagttcctcactatc

SEQ ID NO: 398 - DNA, 17 bp, Homo sapiens
gcagttcctcactatcc

SEQ ID NO: 399 - DNA, 17 bp, Homo sapiens
cagttcctcactatcct

SEQ ID NO: 400 - DNA, 17 bp, Homo sapiens
agttcctcactatcctg

SEQ ID NO: 401 - DNA, 17 bp, Homo sapiens
gttcctcactatcctgc

SEQ ID NO: 402 - DNA, 17 bp, Homo sapiens
ttcctcactatcctgcc

SEQ ID NO: 403 - DNA, 17 bp, Homo sapiens
tcctcactatcctgccc

SEQ ID NO: 404 - DNA, 17 bp, Homo sapiens
cctcactatcctgcccc

SEQ ID NO: 405 - DNA, 17 bp, Homo sapiens
ctcactatcctgccccg

SEQ ID NO: 406 - DNA, 17 bp, Homo sapiens
tcactatcctgccccgc

SEQ ID NO: 407 - DNA, 17 bp, Homo sapiens
cactatcctgccccgcg

SEQ ID NO: 408 - DNA, 17 bp, Homo sapiens
actatcctgccccgcga

SEQ ID NO: 409 - DNA, 17 bp, Homo sapiens
ctatcctgccccgcgag

SEQ ID NO: 410 - DNA, 17 bp, Homo sapiens
tatcctgccccgcgagt

SEQ ID NO: 411 - DNA, 17 bp, Homo sapiens
atcctgccccgcgagtt

SEQ ID NO: 412 - DNA, 17 bp, Homo sapiens
tcctgccccgcgagttc

SEQ ID NO: 413 - DNA, 17 bp, Homo sapiens
cctgccccgcgagttct

SEQ ID NO: 414 - DNA, 17 bp, Homo sapiens
ctgccccgcgagttcta

SEQ ID NO: 415 - DNA, 17 bp, Homo sapiens
tgccccgcgagttctac

SEQ ID NO: 416 - DNA, 17 bp, Homo sapiens
gccccgcgagttctacg

SEQ ID NO: 417 - DNA, 17 bp, Homo sapiens
ccccgcgagttctacgc

SEQ ID NO: 418 - DNA, 17 bp, Homo sapiens
cccgcgagttctacgcc

SEQ ID NO: 419 - DNA, 17 bp, Homo sapiens
ccgcgagttctacgcct

SEQ ID NO: 420 - DNA, 17 bp, Homo sapiens
cgcgagttctacgcctg

SEQ ID NO: 421 - DNA, 17 bp, Homo sapiens
gcgagttctacgcctgg

SEQ ID NO: 422 - DNA, 17 bp, Homo sapiens
cgagttctacgcctgga

SEQ ID NO: 423 - DNA, 17 bp, Homo sapiens
gagttctacgcctggat

SEQ ID NO: 424 - DNA, 17 bp, Homo sapiens
agttctacgcctggatc

SEQ ID NO: 425 - DNA, 17 bp, Homo sapiens
gttctacgcctggatcc

SEQ ID NO: 426 - DNA, 17 bp, Homo sapiens
ttctacgcctggatccg

SEQ ID NO: 427 - DNA, 17 bp, Homo sapiens
tctacgcctggatccgg

SEQ ID NO: 428 - DNA, 17 bp, Homo sapiens
ctacgcctggatccggg

SEQ ID NO: 429 - DNA, 17 bp, Homo sapiens
tacgcctggatccggga

SEQ ID NO: 430 - DNA, 17 bp, Homo sapiens
acgcctggatccgggag

SEQ ID NO: 431 - DNA, 17 bp, Homo sapiens
cgcctggatccgggagc

SEQ ID NO: 432 - DNA, 17 bp, Homo sapiens
gcctggatccgggagca

SEQ ID NO: 433 - DNA, 17 bp, Homo sapiens
cctggatccgggagcat

SEQ ID NO: 434 - DNA, 17 bp, Homo sapiens
ctggatccgggagcatg

SEQ ID NO: 435 - DNA, 17 bp, Homo sapiens
tggatccgggagcatgg

SEQ ID NO: 436 - DNA, 17 bp, Homo sapiens
ggatccgggagcatggc

SEQ ID NO: 437 - DNA, 17 bp, Homo sapiens
gatccgggagcatggcc

SEQ ID NO: 438 - DNA, 17 bp, Homo sapiens
atccgggagcatggccc

SEQ ID NO: 439 - DNA, 17 bp, Homo sapiens
tccgggagcatggccca

SEQ ID NO: 440 - DNA, 17 bp, Homo sapiens
ccgggagcatggcccag

SEQ ID NO: 441 - DNA, 17 bp, Homo sapiens
cgggagcatggcccaga

SEQ ID NO: 442 - DNA, 17 bp, Homo sapiens
gggagcatggcccagag

SEQ ID NO: 443 - DNA, 17 bp, Homo sapiens
ggagcatggcccagaga

SEQ ID NO: 444 - DNA, 17 bp, Homo sapiens
gagcatggcccagagag

SEQ ID NO: 445 - DNA, 17 bp, Homo sapiens
agcatggcccagagagt

SEQ ID NO: 446 - DNA, 17 bp, Homo sapiens
gcatggcccagagagtg

SEQ ID NO: 447 - DNA, 17 bp, Homo sapiens
catggcccagagagtgg

SEQ ID NO: 448 - DNA, 17 bp, Homo sapiens
atggcccagagagtggc

SEQ ID NO: 449 - DNA, 17 bp, Homo sapiens
tggcccagagagtggca

SEQ ID NO: 450 - DNA, 17 bp, Homo sapiens
ggcccagagagtggcaa

SEQ ID NO: 451 - DNA, 17 bp, Homo sapiens
gcccagagagtggcaag

SEQ ID NO: 452 - DNA, 17 bp, Homo sapiens
cccagagagtggcaagg

SEQ ID NO: 453 - DNA, 17 bp, Homo sapiens
ccagagagtggcaaggc

SEQ ID NO: 454 - DNA, 17 bp, Homo sapiens
cagagagtggcaaggcc

SEQ ID NO: 455 - DNA, 17 bp, Homo sapiens
agagagtggcaaggccc

SEQ ID NO: 456 - DNA, 17 bp, Homo sapiens
gagagtggcaaggccct

SEQ ID NO: 457 - DNA, 17 bp, Homo sapiens
agagtggcaaggccctg

SEQ ID NO: 458 - DNA, 17 bp, Homo sapiens
gagtggcaaggccctgg

SEQ ID NO: 459 - DNA, 17 bp, Homo sapiens
agtggcaaggccctggc

SEQ ID NO: 460 - DNA, 17 bp, Homo sapiens
gtggcaaggccctggcc

SEQ ID NO: 461 - DNA, 17 bp, Homo sapiens
tggcaaggccctggccg

SEQ ID NO: 462 - DNA, 17 bp, Homo sapiens
ggcaaggccctggccgc

SEQ ID NO: 463 - DNA, 17 bp, Homo sapiens
gcaaggccctggccgcc

SEQ ID NO: 464 - DNA, 17 bp, Homo sapiens
caaggccctggccgcca

SEQ ID NO: 465 - DNA, 17 bp, Homo sapiens
aaggccctggccgccat

SEQ ID NO: 466 - DNA, 17 bp, Homo sapiens
aggccctggccgccatg

SEQ ID NO: 467 - DNA, 17 bp, Homo sapiens
ggccctggccgccatgg

SEQ ID NO: 468 - DNA, 17 bp, Homo sapiens
gccctggccgccatggt

SEQ ID NO: 469 - DNA, 17 bp, Homo sapiens
ccctggccgccatggtg

SEQ ID NO: 470 - DNA, 17 bp, Homo sapiens
cctggccgccatggtgg

SEQ ID NO: 471 - DNA, 17 bp, Homo sapiens
ctggccgccatggtgga

SEQ ID NO: 472 - DNA, 17 bp, Homo sapiens
tggccgccatggtggag

SEQ ID NO: 473 - DNA, 17 bp, Homo sapiens
ggccgccatggtggagg

SEQ ID NO: 474 - DNA, 17 bp, Homo sapiens
gccgccatggtggagga

SEQ ID NO: 475 - DNA, 17 bp, Homo sapiens
ccgccatggtggaggac

SEQ ID NO: 476 - DNA, 17 bp, Homo sapiens
cgccatggtggaggacc

SEQ ID NO: 477 - DNA, 17 bp, Homo sapiens
gccatggtggaggacct

SEQ ID NO: 478 - DNA, 17 bp, Homo sapiens
ccatggtggaggacctg

SEQ ID NO: 479 - DNA, 17 bp, Homo sapiens
catggtggaggacctga

SEQ ID NO: 480 - DNA, 17 bp, Homo sapiens
atggtggaggacctgac

SEQ ID NO: 481 - DNA, 17 bp, Homo sapiens
tggtggaggacctgaca

SEQ ID NO: 482 - DNA, 17 bp, Homo sapiens
ggtggaggacctgacag

SEQ ID NO: 483 - DNA, 17 bp, Homo sapiens
gtggaggacctgacaga

SEQ ID NO: 484 - DNA, 17 bp, Homo sapiens
tggaggacctgacagaa

SEQ ID NO: 485 - DNA, 17 bp, Homo sapiens
ggaggacctgacagaaa

SEQ ID NO: 486 - DNA, 17 bp, Homo sapiens
gaggacctgacagaaag

SEQ ID NO: 487 - DNA, 17 bp, Homo sapiens
aggacctgacagaaaga

SEQ ID NO: 488 - DNA, 17 bp, Homo sapiens
ggacctgacagaaagag

SEQ ID NO: 489 - DNA, 17 bp, Homo sapiens
gacctgacagaaagagc

SEQ ID NO: 490 - DNA, 17 bp, Homo sapiens
acctgacagaaagagca

SEQ ID NO: 491 - DNA, 17 bp, Homo sapiens
cctgacagaaagagcac

SEQ ID NO: 492 - DNA, 17 bp, Homo sapiens
ctgacagaaagagcact

SEQ ID NO: 493 - DNA, 17 bp, Homo sapiens
tgacagaaagagcactg

SEQ ID NO: 494 - DNA, 17 bp, Homo sapiens
gacagaaagagcactgg

SEQ ID NO: 495 - DNA, 17 bp, Homo sapiens
acagaaagagcactgga

SEQ ID NO: 496 - DNA, 17 bp, Homo sapiens
cagaaagagcactggag

SEQ ID NO: 497 - DNA, 17 bp, Homo sapiens
agaaagagcactggagg

SEQ ID NO: 498 - DNA, 17 bp, Homo sapiens
gaaagagcactggaggc

SEQ ID NO: 499 - DNA, 17 bp, Homo sapiens
aaagagcactggaggcc

SEQ ID NO: 500 - DNA, 17 bp, Homo sapiens
aagagcactggaggcca

SEQ ID NO: 501 - DNA, 17 bp, Homo sapiens
agagcactggaggccaa

SEQ ID NO: 502 - DNA, 17 bp, Homo sapiens
gagcactggaggccaag

SEQ ID NO: 503 - DNA, 17 bp, Homo sapiens
agcactggaggccaagg

SEQ ID NO: 504 - DNA, 17 bp, Homo sapiens
gcactggaggccaaggc

SEQ ID NO: 505 - DNA, 17 bp, Homo sapiens
cactggaggccaaggcg

SEQ ID NO: 506 - DNA, 17 bp, Homo sapiens
actggaggccaaggcgg

SEQ ID NO: 507 - DNA, 17 bp, Homo sapiens
ctggaggccaaggcggt

SEQ ID NO: 508 - DNA, 17 bp, Homo sapiens
tggaggccaaggcggtt

SEQ ID NO: 509 - DNA, 17 bp, Homo sapiens
ggaggccaaggcggttc

SEQ ID NO: 510 - DNA, 17 bp, Homo sapiens
gaggccaaggcggttcc

SEQ ID NO: 511 - DNA, 17 bp, Homo sapiens
aggccaaggcggttcca

SEQ ID NO: 512 - DNA, 17 bp, Homo sapiens
ggccaaggcggttccat

SEQ ID NO: 513 - DNA, 17 bp, Homo sapiens
gccaaggcggttccatg

SEQ ID NO: 514 - DNA, 17 bp, Homo sapiens
ccaaggcggttccatgc

SEQ ID NO: 515 - DNA, 17 bp, Homo sapiens
caaggcggttccatgcc

SEQ ID NO: 516 - DNA, 17 bp, Homo sapiens
aaggcggttccatgcca

SEQ ID NO: 517 - DNA, 17 bp, Homo sapiens
aggcggttccatgccac

SEQ ID NO: 518 - DNA, 17 bp, Homo sapiens
ggcggttccatgccaca

SEQ ID NO: 519 - DNA, 17 bp, Homo sapiens
gcggttccatgccacag

SEQ ID NO: 520 - DNA, 17 bp, Homo sapiens
cggttccatgccacagg

SEQ ID NO: 521 - DNA, 17 bp, Homo sapiens
ggttccatgccacaggc

SEQ ID NO: 522 - DNA, 17 bp, Homo sapiens
gttccatgccacaggca

SEQ ID NO: 523 - DNA, 17 bp, Homo sapiens
ttccatgccacaggcag

SEQ ID NO: 524 - DNA, 17 bp, Homo sapiens
tccatgccacaggcagg

SEQ ID NO: 525 - DNA, 17 bp, Homo sapiens
ccatgccacaggcaggg

SEQ ID NO: 526 - DNA, 17 bp, Homo sapiens
catgccacaggcaggga

SEQ ID NO: 527 - DNA, 17 bp, Homo sapiens
atgccacaggcagggag

SEQ ID NO: 528 - DNA, 17 bp, Homo sapiens
tgccacaggcagggaga

SEQ ID NO: 529 - DNA, 17 bp, Homo sapiens
gccacaggcagggagag

SEQ ID NO: 530 - DNA, 17 bp, Homo sapiens
ccacaggcagggagagc

SEQ ID NO: 531 - DNA, 17 bp, Homo sapiens
cacaggcagggagagca

SEQ ID NO: 532 - DNA, 17 bp, Homo sapiens
acaggcagggagagcag

SEQ ID NO: 533 - DNA, 17 bp, Homo sapiens
caggcagggagagcagg

SEQ ID NO: 534 - DNA, 17 bp, Homo sapiens
aggcagggagagcagga

SEQ ID NO: 535 - DNA, 17 bp, Homo sapiens
ggcagggagagcaggag

SEQ ID NO: 536 - DNA, 17 bp, Homo sapiens
gcagggagagcaggagg

SEQ ID NO: 537 - DNA, 17 bp, Homo sapiens
cagggagagcaggagga

SEQ ID NO: 538 - DNA, 17 bp, Homo sapiens
agggagagcaggaggaa

SEQ ID NO: 539 - DNA, 17 bp, Homo sapiens
gggagagcaggaggaaa

SEQ ID NO: 540 - DNA, 17 bp, Homo sapiens
ggagagcaggaggaaac

SEQ ID NO: 541 - DNA, 17 bp, Homo sapiens
gagagcaggaggaaaca

SEQ ID NO: 542 - DNA, 17 bp, Homo sapiens
agagcaggaggaaacag

SEQ ID NO: 543 - DNA, 17 bp, Homo sapiens
gagcaggaggaaacagc

SEQ ID NO: 544 - DNA, 17 bp, Homo sapiens
agcaggaggaaacagca

SEQ ID NO: 545 - DNA, 17 bp, Homo sapiens
gcaggaggaaacagcac

SEQ ID NO: 546 - DNA, 17 bp, Homo sapiens
caggaggaaacagcact

SEQ ID NO: 547 - DNA, 17 bp, Homo sapiens
aggaggaaacagcactt

SEQ ID NO: 548 - DNA, 17 bp, Homo sapiens
ggaggaaacagcacttt

SEQ ID NO: 549 - DNA, 17 bp, Homo sapiens
gaggaaacagcactttg

SEQ ID NO: 550 - DNA, 17 bp, Homo sapiens
aggaaacagcactttgc

SEQ ID NO: 551 - DNA, 17 bp, Homo sapiens
ggaaacagcactttgca

SEQ ID NO: 552 - DNA, 17 bp, Homo sapiens
gaaacagcactttgcag

SEQ ID NO: 553 - DNA, 17 bp, Homo sapiens
aaacagcactttgcaga

SEQ ID NO: 554 - DNA, 17 bp, Homo sapiens
aacagcactttgcagag

SEQ ID NO: 555 - DNA, 17 bp, Homo sapiens
acagcactttgcagagg

SEQ ID NO: 556 - DNA, 17 bp, Homo sapiens
cagcactttgcagaggc

SEQ ID NO: 557 - DNA, 17 bp, Homo sapiens
agcactttgcagaggcg

SEQ ID NO: 558 - DNA, 17 bp, Homo sapiens
gcactttgcagaggcgc

SEQ ID NO: 559 - DNA, 17 bp, Homo sapiens
cactttgcagaggcgct

SEQ ID NO: 560 - DNA, 17 bp, Homo sapiens
actttgcagaggcgctt

SEQ ID NO: 561 - DNA, 17 bp, Homo sapiens
ctttgcagaggcgcttg

SEQ ID NO: 562 - DNA, 17 bp, Homo sapiens
tttgcagaggcgcttgg

SEQ ID NO: 563 - DNA, 17 bp, Homo sapiens
ttgcagaggcgcttggg

SEQ ID NO: 564 - DNA, 17 bp, Homo sapiens
tgcagaggcgcttggga

SEQ ID NO: 565 - DNA, 17 bp, Homo sapiens
gcagaggcgcttgggag

SEQ ID NO: 566 - DNA, 17 bp, Homo sapiens
cagaggcgcttgggagc

SEQ ID NO: 567 - DNA, 17 bp, Homo sapiens
agaggcgcttgggagcc

SEQ ID NO: 568 - DNA, 17 bp, Homo sapiens
gaggcgcttgggagcca

SEQ ID NO: 569 - DNA, 17 bp, Homo sapiens
aggcgcttgggagccag

SEQ ID NO: 570 - DNA, 17 bp, Homo sapiens
ggcgcttgggagccagg

SEQ ID NO: 571 - DNA, 17 bp, Homo sapiens
gcgcttgggagccaggc

SEQ ID NO: 572 - DNA, 17 bp, Homo sapiens
cgcttgggagccaggca

SEQ ID NO: 573 - DNA, 17 bp, Homo sapiens
gcttgggagccaggcat

SEQ ID NO: 574 - DNA, 17 bp, Homo sapiens
cttgggagccaggcatc

SEQ ID NO: 575 - DNA, 17 bp, Homo sapiens
ttgggagccaggcatcc

SEQ ID NO: 576 - DNA, 17 bp, Homo sapiens
tgggagccaggcatcca

SEQ ID NO: 577 - DNA, 17 bp, Homo sapiens
gggagccaggcatccag

SEQ ID NO: 578 - DNA, 17 bp, Homo sapiens
ggagccaggcatccagc

SEQ ID NO: 579 - DNA, 17 bp, Homo sapiens
gagccaggcatccagct

SEQ ID NO: 580 - DNA, 17 bp, Homo sapiens
agccaggcatccagctg

SEQ ID NO: 581 - DNA, 17 bp, Homo sapiens
gccaggcatccagctgg

SEQ ID NO: 582 - DNA, 17 bp, Homo sapiens
ccaggcatccagctggg

SEQ ID NO: 583 - DNA, 17 bp, Homo sapiens
caggcatccagctgggg

SEQ ID NO: 584 - DNA, 17 bp, Homo sapiens
aggcatccagctggggc

SEQ ID NO: 585 - DNA, 17 bp, Homo sapiens
ggcatccagctggggcc

SEQ ID NO: 586 - DNA, 17 bp, Homo sapiens
gcatccagctggggcca

SEQ ID NO: 587 - DNA, 17 bp, Homo sapiens
catccagctggggccag

SEQ ID NO: 588 - DNA, 17 bp, Homo sapiens
atccagctggggccagt

SEQ ID NO: 589 - DNA, 17 bp, Homo sapiens
tccagctggggccagtg

SEQ ID NO: 590 - DNA, 17 bp, Homo sapiens
ccagctggggccagtgg

SEQ ID NO: 591 - DNA, 17 bp, Homo sapiens
cagctggggccagtgga

SEQ ID NO: 592 - DNA, 17 bp, Homo sapiens
agctggggccagtggag

SEQ ID NO: 593 - DNA, 17 bp, Homo sapiens
gctggggccagtggagg

SEQ ID NO: 594 - DNA, 17 bp, Homo sapiens
ctggggccagtggaggt

SEQ ID NO: 595 - DNA, 17 bp, Homo sapiens
tggggccagtggaggtt

SEQ ID NO: 596 - DNA, 17 bp, Homo sapiens
ggggccagtggaggtta

SEQ ID NO: 597 - DNA, 17 bp, Homo sapiens
gggccagtggaggttaa

SEQ ID NO: 598 - DNA, 17 bp, Homo sapiens
ggccagtggaggttaag

SEQ ID NO: 599 - DNA, 17 bp, Homo sapiens
gccagtggaggttaagc

SEQ ID NO: 600 - DNA, 17 bp, Homo sapiens
ccagtggaggttaagcc

SEQ ID NO: 601 - DNA, 17 bp, Homo sapiens
cagtggaggttaagcct

SEQ ID NO: 602 - DNA, 17 bp, Homo sapiens
agtggaggttaagcctg

SEQ ID NO: 603 - DNA, 17 bp, Homo sapiens
gtggaggttaagcctga

SEQ ID NO: 604 - DNA, 17 bp, Homo sapiens
tggaggttaagcctgaa

SEQ ID NO: 605 - DNA, 17 bp, Homo sapiens
ggaggttaagcctgaat

SEQ ID NO: 606 - DNA, 17 bp, Homo sapiens
gaggttaagcctgaatg

SEQ ID NO: 607 - DNA, 17 bp, Homo sapiens
aggttaagcctgaatgg

SEQ ID NO: 608 - DNA, 17 bp, Homo sapiens
ggttaagcctgaatggg

SEQ ID NO: 609 - DNA, 17 bp, Homo sapiens
gttaagcctgaatgggg

SEQ ID NO: 610 - DNA, 17 bp, Homo sapiens
ttaagcctgaatggggg

SEQ ID NO: 611 - DNA, 17 bp, Homo sapiens
taagcctgaatggggga

SEQ ID NO: 612 - DNA, 17 bp, Homo sapiens
aagcctgaatgggggat

SEQ ID NO: 613 - DNA, 17 bp, Homo sapiens
agcctgaatgggggatg

SEQ ID NO: 614 - DNA, 17 bp, Homo sapiens
gcctgaatgggggatgc

SEQ ID NO: 615 - DNA, 17 bp, Homo sapiens
cctgaatgggggatgcc

SEQ ID NO: 616 - DNA, 17 bp, Homo sapiens
ctgaatgggggatgccc

SEQ ID NO: 617 - DNA, 17 bp, Homo sapiens
tgaatgggggatgcccc

SEQ ID NO: 618 - DNA, 17 bp, Homo sapiens
gaatgggggatgccccc

SEQ ID NO: 619 - DNA, 17 bp, Homo sapiens
aatgggggatgccccct

SEQ ID NO: 620 - DNA, 17 bp, Homo sapiens
atgggggatgccccctg

SEQ ID NO: 621 - DNA, 17 bp, Homo sapiens
tgggggatgccccctgg

SEQ ID NO: 622 - DNA, 17 bp, Homo sapiens
gggggatgccccctggg

SEQ ID NO: 623 - DNA, 17 bp, Homo sapiens
ggggatgccccctgggg

SEQ ID NO: 624 - DNA, 17 bp, Homo sapiens
gggatgccccctgggga

SEQ ID NO: 625 - DNA, 17 bp, Homo sapiens
ggatgccccctggggaa

SEQ ID NO: 626 - DNA, 17 bp, Homo sapiens
gatgccccctggggaag

SEQ ID NO: 627 - DNA, 17 bp, Homo sapiens
atgccccctggggaagg

SEQ ID NO: 628 - DNA, 17 bp, Homo sapiens
tgccccctggggaagga

SEQ ID NO: 629 - DNA, 17 bp, Homo sapiens
gccccctggggaaggag

SEQ ID NO: 630 - DNA, 17 bp, Homo sapiens
ccccctggggaaggagt

SEQ ID NO: 631 - DNA, 17 bp, Homo sapiens
cccctggggaaggagtt

SEQ ID NO: 632 - DNA, 17 bp, Homo sapiens
ccctggggaaggagttc

SEQ ID NO: 633 - DNA, 17 bp, Homo sapiens
cctggggaaggagttca

SEQ ID NO: 634 - DNA, 17 bp, Homo sapiens
ctggggaaggagttcaa

SEQ ID NO: 635 - DNA, 17 bp, Homo sapiens
tggggaaggagttcaag

SEQ ID NO: 636 - DNA, 17 bp, Homo sapiens
ggggaaggagttcaagg

SEQ ID NO: 637 - DNA, 17 bp, Homo sapiens
gggaaggagttcaaggt

SEQ ID NO: 638 - DNA, 17 bp, Homo sapiens
ggaaggagttcaaggtc

SEQ ID NO: 639 - DNA, 17 bp, Homo sapiens
gaaggagttcaaggtcc

SEQ ID NO: 640 - DNA, 17 bp, Homo sapiens
aaggagttcaaggtcca

SEQ ID NO: 641 - DNA, 17 bp, Homo sapiens
aggagttcaaggtccag

SEQ ID NO: 642 - DNA, 17 bp, Homo sapiens
ggagttcaaggtccaga

SEQ ID NO: 643 - DNA, 17 bp, Homo sapiens
gagttcaaggtccagac

SEQ ID NO: 644 - DNA, 17 bp, Homo sapiens
agttcaaggtccagacc

SEQ ID NO: 645 - DNA, 17 bp, Homo sapiens
gttcaaggtccagaccc

SEQ ID NO: 646 - DNA, 17 bp, Homo sapiens
ttcaaggtccagaccca

SEQ ID NO: 647 - DNA, 17 bp, Homo sapiens
tcaaggtccagacccag

SEQ ID NO: 648 - DNA, 17 bp, Homo sapiens
caaggtccagacccagg

SEQ ID NO: 649 - DNA, 17 bp, Homo sapiens
aaggtccagacccaggt

SEQ ID NO: 650 - DNA, 17 bp, Homo sapiens
aggtccagacccaggta

SEQ ID NO: 651 - DNA, 17 bp, Homo sapiens
ggtccagacccaggtac

SEQ ID NO: 652 - DNA, 17 bp, Homo sapiens
gtccagacccaggtacc

SEQ ID NO: 653 - DNA, 17 bp, Homo sapiens
tccagacccaggtaccg

SEQ ID NO: 654 - DNA, 17 bp, Homo sapiens
ccagacccaggtaccga

SEQ ID NO: 655 - DNA, 17 bp, Homo sapiens
cagacccaggtaccgag

SEQ ID NO: 656 - DNA, 17 bp, Homo sapiens
agacccaggtaccgagg

SEQ ID NO: 657 - DNA, 17 bp, Homo sapiens
gacccaggtaccgagga

SEQ ID NO: 658 - DNA, 17 bp, Homo sapiens
acccaggtaccgaggag

SEQ ID NO: 659 - DNA, 17 bp, Homo sapiens
cccaggtaccgaggagc

SEQ ID NO: 660 - DNA, 17 bp, Homo sapiens
ccaggtaccgaggagca

SEQ ID NO: 661 - DNA, 17 bp, Homo sapiens
caggtaccgaggagcag

SEQ ID NO: 662 - DNA, 17 bp, Homo sapiens
aggtaccgaggagcagc

SEQ ID NO: 663 - DNA, 17 bp, Homo sapiens
ggtaccgaggagcagct

SEQ ID NO: 664 - DNA, 17 bp, Homo sapiens
gtaccgaggagcagctc

SEQ ID NO: 665 - DNA, 17 bp, Homo sapiens
taccgaggagcagctca

SEQ ID NO: 666 - DNA, 17 bp, Homo sapiens
accgaggagcagctcag

SEQ ID NO: 667 - DNA, 17 bp, Homo sapiens
ccgaggagcagctcagt

SEQ ID NO: 668 - DNA, 17 bp, Homo sapiens
cgaggagcagctcagtc

SEQ ID NO: 669 - DNA, 17 bp, Homo sapiens
gaggagcagctcagtca

SEQ ID NO: 670 - DNA, 17 bp, Homo sapiens
aggagcagctcagtcag

SEQ ID NO: 671 - DNA, 17 bp, Homo sapiens
ggagcagctcagtcagg

SEQ ID NO: 672 - DNA, 17 bp, Homo sapiens
gagcagctcagtcagga

SEQ ID NO: 673 - DNA, 17 bp, Homo sapiens
agcagctcagtcaggac

SEQ ID NO: 674 - DNA, 17 bp, Homo sapiens
gcagctcagtcaggacc

SEQ ID NO: 675 - DNA, 17 bp, Homo sapiens
cagctcagtcaggaccc

SEQ ID NO: 676 - DNA, 17 bp, Homo sapiens
agctcagtcaggaccct

SEQ ID NO: 677 - DNA, 17 bp, Homo sapiens
gctcagtcaggaccctg

SEQ ID NO: 678 - DNA, 17 bp, Homo sapiens
ctcagtcaggaccctgg

SEQ ID NO: 679 - DNA, 17 bp, Homo sapiens
tcagtcaggaccctgga

SEQ ID NO: 680 - DNA, 17 bp, Homo sapiens
cagtcaggaccctggag

SEQ ID NO: 681 - DNA, 17 bp, Homo sapiens
agtcaggaccctggaga

SEQ ID NO: 682 - DNA, 17 bp, Homo sapiens
gtcaggaccctggagat

SEQ ID NO: 683 - DNA, 17 bp, Homo sapiens
tcaggaccctggagatg

SEQ ID NO: 684 - DNA, 17 bp, Homo sapiens
caggaccctggagatga

SEQ ID NO: 685 - DNA, 17 bp, Homo sapiens
aggaccctggagatgag

SEQ ID NO: 686 - DNA, 17 bp, Homo sapiens
ggaccctggagatgaga

SEQ ID NO: 687 - DNA, 17 bp, Homo sapiens
gaccctggagatgagac

SEQ ID NO: 688 - DNA, 17 bp, Homo sapiens
accctggagatgagaca

SEQ ID NO: 689 - DNA, 17 bp, Homo sapiens
ccctggagatgagacac

SEQ ID NO: 690 - DNA, 17 bp, Homo sapiens
cctggagatgagacacg

SEQ ID NO: 691 - DNA, 17 bp, Homo sapiens
ctggagatgagacacgg

SEQ ID NO: 692 - DNA, 17 bp, Homo sapiens
tggagatgagacacggg

SEQ ID NO: 693 - DNA, 17 bp, Homo sapiens
ggagatgagacacgggc

SEQ ID NO: 694 - DNA, 17 bp, Homo sapiens
gagatgagacacgggcc

SEQ ID NO: 695 - DNA, 17 bp, Homo sapiens
agatgagacacgggcct

SEQ ID NO: 696 - DNA, 17 bp, Homo sapiens
gatgagacacgggcctt

SEQ ID NO: 697 - DNA, 17 bp, Homo sapiens
atgagacacgggccttc

SEQ ID NO: 698 - DNA, 17 bp, Homo sapiens
tgagacacgggccttcc

SEQ ID NO: 699 - DNA, 17 bp, Homo sapiens
gagacacgggccttcca

SEQ ID NO: 700 - DNA, 17 bp, Homo sapiens
agacacgggccttccag

SEQ ID NO: 701 - DNA, 17 bp, Homo sapiens
gacacgggccttccagg

SEQ ID NO: 702 - DNA, 17 bp, Homo sapiens
acacgggccttccagga

SEQ ID NO: 703 - DNA, 17 bp, Homo sapiens
cacgggccttccaggag

SEQ ID NO: 704 - DNA, 17 bp, Homo sapiens
acgggccttccaggagc

SEQ ID NO: 705 - DNA, 17 bp, Homo sapiens
cgggccttccaggagca

SEQ ID NO: 706 - DNA, 17 bp, Homo sapiens
gggccttccaggagcaa

SEQ ID NO: 707 - DNA, 17 bp, Homo sapiens
ggccttccaggagcaag

SEQ ID NO: 708 - DNA, 17 bp, Homo sapiens
gccttccaggagcaagc

SEQ ID NO: 709 - DNA, 17 bp, Homo sapiens
ccttccaggagcaagca

SEQ ID NO: 710 - DNA, 17 bp, Homo sapiens
cttccaggagcaagcac

SEQ ID NO: 711 - DNA, 17 bp, Homo sapiens
ttccaggagcaagcact

SEQ ID NO: 712 - DNA, 17 bp, Homo sapiens
tccaggagcaagcacta

SEQ ID NO: 713 - DNA, 17 bp, Homo sapiens
ccaggagcaagcactac

SEQ ID NO: 714 - DNA, 17 bp, Homo sapiens
caggagcaagcactacc

SEQ ID NO: 715 - DNA, 17 bp, Homo sapiens
aggagcaagcactacct

SEQ ID NO: 716 - DNA, 17 bp, Homo sapiens
ggagcaagcactacctg

SEQ ID NO: 717 - DNA, 17 bp, Homo sapiens
gagcaagcactacctgt

SEQ ID NO: 718 - DNA, 17 bp, Homo sapiens
agcaagcactacctgtt

SEQ ID NO: 719 - DNA, 17 bp, Homo sapiens
gcaagcactacctgttc

SEQ ID NO: 720 - DNA, 17 bp, Homo sapiens
caagcactacctgttct

SEQ ID NO: 721 - DNA, 17 bp, Homo sapiens
aagcactacctgttctg

SEQ ID NO: 722 - DNA, 17 bp, Homo sapiens
agcactacctgttctgc

SEQ ID NO: 723 - DNA, 17 bp, Homo sapiens
gcactacctgttctgca

SEQ ID NO: 724 - DNA, 17 bp, Homo sapiens
cactacctgttctgcag

SEQ ID NO: 725 - DNA, 17 bp, Homo sapiens
actacctgttctgcagg

SEQ ID NO: 726 - DNA, 17 bp, Homo sapiens
ctacctgttctgcaggc

SEQ ID NO: 727 - DNA, 17 bp, Homo sapiens
tacctgttctgcaggcg

SEQ ID NO: 728 - DNA, 17 bp, Homo sapiens
acctgttctgcaggcgg

SEQ ID NO: 729 - DNA, 17 bp, Homo sapiens
cctgttctgcaggcggg

SEQ ID NO: 730 - DNA, 17 bp, Homo sapiens
ctgttctgcaggcgggt

SEQ ID NO: 731 - DNA, 17 bp, Homo sapiens
tgttctgcaggcgggtc

SEQ ID NO: 732 - DNA, 17 bp, Homo sapiens
gttctgcaggcgggtcc

SEQ ID NO: 733 - DNA, 17 bp, Homo sapiens
ttctgcaggcgggtcct

SEQ ID NO: 734 - DNA, 17 bp, Homo sapiens
tctgcaggcgggtcctg

SEQ ID NO: 735 - DNA, 17 bp, Homo sapiens
ctgcaggcgggtcctgg

SEQ ID NO: 736 - DNA, 17 bp, Homo sapiens
tgcaggcgggtcctggc

SEQ ID NO: 737 - DNA, 17 bp, Homo sapiens
gcaggcgggtcctggcc

SEQ ID NO: 738 - DNA, 17 bp, Homo sapiens
caggcgggtcctggcct

SEQ ID NO: 739 - DNA, 17 bp, Homo sapiens
aggcgggtcctggcctc

SEQ ID NO: 740 - DNA, 17 bp, Homo sapiens
ggcgggtcctggcctcc

SEQ ID NO: 741 - DNA, 17 bp, Homo sapiens
gcgggtcctggcctccc

SEQ ID NO: 742 - DNA, 17 bp, Homo sapiens
cgggtcctggcctcccc

SEQ ID NO: 743 - DNA, 17 bp, Homo sapiens
gggtcctggcctccccg

SEQ ID NO: 744 - DNA, 17 bp, Homo sapiens
ggtcctggcctccccgc

SEQ ID NO: 745 - DNA, 17 bp, Homo sapiens
gtcctggcctccccgca

SEQ ID NO: 746 - DNA, 17 bp, Homo sapiens
tcctggcctccccgcag

SEQ ID NO: 747 - DNA, 17 bp, Homo sapiens
cctggcctccccgcagt

SEQ ID NO: 748 - DNA, 17 bp, Homo sapiens
ctggcctccccgcagtg

SEQ ID NO: 749 - DNA, 17 bp, Homo sapiens
tggcctccccgcagtga

SEQ ID NO: 750 - DNA, 17 bp, Homo sapiens
ggcctccccgcagtgaa

SEQ ID NO: 751 - DNA, 17 bp, Homo sapiens
gcctccccgcagtgaat

SEQ ID NO: 752 - DNA, 17 bp, Homo sapiens
cctccccgcagtgaatc

SEQ ID NO: 753 - DNA, 17 bp, Homo sapiens
ctccccgcagtgaatcc

SEQ ID NO: 754 - DNA, 17 bp, Homo sapiens
tccccgcagtgaatccc

SEQ ID NO: 755 - DNA, 17 bp, Homo sapiens
ccccgcagtgaatccca

SEQ ID NO: 756 - DNA, 17 bp, Homo sapiens
cccgcagtgaatcccag

SEQ ID NO: 757 - DNA, 17 bp, Homo sapiens
ccgcagtgaatcccaga

SEQ ID NO: 758 - DNA, 17 bp, Homo sapiens
cgcagtgaatcccagag

SEQ ID NO: 759 - DNA, 17 bp, Homo sapiens
gcagtgaatcccagaga

SEQ ID NO: 760 - DNA, 17 bp, Homo sapiens
cagtgaatcccagagac

SEQ ID NO: 761 - DNA, 17 bp, Homo sapiens
agtgaatcccagagacc

SEQ ID NO: 762 - DNA, 17 bp, Homo sapiens
gtgaatcccagagacca

SEQ ID NO: 763 - DNA, 17 bp, Homo sapiens
tgaatcccagagaccaa

SEQ ID NO: 764 - DNA, 17 bp, Homo sapiens
gaatcccagagaccaag

SEQ ID NO: 765 - DNA, 17 bp, Homo sapiens
aatcccagagaccaaga

SEQ ID NO: 766 - DNA, 17 bp, Homo sapiens
atcccagagaccaagag

SEQ ID NO: 767 - DNA, 17 bp, Homo sapiens
tcccagagaccaagaga

SEQ ID NO: 768 - DNA, 17 bp, Homo sapiens
cccagagaccaagagat

SEQ ID NO: 769 - DNA, 17 bp, Homo sapiens
ccagagaccaagagatg

SEQ ID NO: 770 - DNA, 17 bp, Homo sapiens
cagagaccaagagatgg

SEQ ID NO: 771 - DNA, 17 bp, Homo sapiens
agagaccaagagatggc

SEQ ID NO: 772 - DNA, 17 bp, Homo sapiens
gagaccaagagatggca

SEQ ID NO: 773 - DNA, 17 bp, Homo sapiens
agaccaagagatggcag

SEQ ID NO: 774 - DNA, 17 bp, Homo sapiens
gaccaagagatggcagc

SEQ ID NO: 775 - DNA, 17 bp, Homo sapiens
accaagagatggcagct

SEQ ID NO: 776 - DNA, 17 bp, Homo sapiens
ccaagagatggcagctg

SEQ ID NO: 777 - DNA, 17 bp, Homo sapiens
caagagatggcagctgg

SEQ ID NO: 778 - DNA, 17 bp, Homo sapiens
aagagatggcagctggg

SEQ ID NO: 779 - DNA, 17 bp, Homo sapiens
agagatggcagctgggt

SEQ ID NO: 780 - DNA, 17 bp, Homo sapiens
gagatggcagctgggtt

SEQ ID NO: 781 - DNA, 17 bp, Homo sapiens
agatggcagctgggttc

SEQ ID NO: 782 - DNA, 17 bp, Homo sapiens
gatggcagctgggttct

SEQ ID NO: 783 - DNA, 17 bp, Homo sapiens
atggcagctgggttctt

SEQ ID NO: 784 - DNA, 17 bp, Homo sapiens
tggcagctgggttcttt

SEQ ID NO: 785 - DNA, 17 bp, Homo sapiens
ggcagctgggttcttta

SEQ ID NO: 786 - DNA, 17 bp, Homo sapiens
gcagctgggttctttac

SEQ ID NO: 787 - DNA, 17 bp, Homo sapiens
cagctgggttctttact

SEQ ID NO: 788 - DNA, 17 bp, Homo sapiens
agctgggttctttactg

SEQ ID NO: 789 - DNA, 17 bp, Homo sapiens
gctgggttctttactgc

SEQ ID NO: 790 - DNA, 17 bp, Homo sapiens
ctgggttctttactgct

SEQ ID NO: 791 - DNA, 17 bp, Homo sapiens
tgggttctttactgctg

SEQ ID NO: 792 - DNA, 17 bp, Homo sapiens
gggttctttactgctgg

SEQ ID NO: 793 - DNA, 17 bp, Homo sapiens
ggttctttactgctgga

SEQ ID NO: 794 - DNA, 17 bp, Homo sapiens
gttctttactgctggat

SEQ ID NO: 795 - DNA, 17 bp, Homo sapiens
ttctttactgctggatc

SEQ ID NO: 796 - DNA, 17 bp, Homo sapiens
tctttactgctggatcg

SEQ ID NO: 797 - DNA, 17 bp, Homo sapiens
ctttactgctggatcgc

SEQ ID NO: 798 - DNA, 17 bp, Homo sapiens
tttactgctggatcgca

SEQ ID NO: 799 - DNA, 17 bp, Homo sapiens
ttactgctggatcgcag

SEQ ID NO: 800 - DNA, 17 bp, Homo sapiens
tactgctggatcgcagg

SEQ ID NO: 801 - DNA, 17 bp, Homo sapiens
actgctggatcgcaggg

SEQ ID NO: 802 - DNA, 17 bp, Homo sapiens
ctgctggatcgcagggg

SEQ ID NO: 803 - DNA, 17 bp, Homo sapiens
tgctggatcgcaggggt

SEQ ID NO: 804 - DNA, 17 bp, Homo sapiens
gctggatcgcaggggtt

SEQ ID NO: 805 - DNA, 17 bp, Homo sapiens
ctggatcgcaggggttg

SEQ ID NO: 806 - DNA, 17 bp, Homo sapiens
tggatcgcaggggttgg

SEQ ID NO: 807 - DNA, 17 bp, Homo sapiens
ggatcgcaggggttggg

SEQ ID NO: 808 - DNA, 17 bp, Homo sapiens
gatcgcaggggttgggg

SEQ ID NO: 809 - DNA, 17 bp, Homo sapiens
atcgcaggggttggggc

SEQ ID NO: 810 - DNA, 17 bp, Homo sapiens
tcgcaggggttggggcc

SEQ ID NO: 811 - DNA, 17 bp, Homo sapiens
cgcaggggttggggcca

SEQ ID NO: 812 - DNA, 17 bp, Homo sapiens
gcaggggttggggccat

SEQ ID NO: 813 - DNA, 17 bp, Homo sapiens
caggggttggggccatt

SEQ ID NO: 814 - DNA, 17 bp, Homo sapiens
aggggttggggccattt

SEQ ID NO: 815 - DNA, 17 bp, Homo sapiens
ggggttggggccattta

SEQ ID NO: 816 - DNA, 17 bp, Homo sapiens
gggttggggccatttaa

SEQ ID NO: 817 - DNA, 17 bp, Homo sapiens
ggttggggccatttaaa

SEQ ID NO: 818 - DNA, 17 bp, Homo sapiens
gttggggccatttaaag

SEQ ID NO: 819 - DNA, 17 bp, Homo sapiens
ttggggccatttaaaga

SEQ ID NO: 820 - DNA, 17 bp, Homo sapiens
tggggccatttaaagat

SEQ ID NO: 821 - DNA, 17 bp, Homo sapiens
ggggccatttaaagata

SEQ ID NO: 822 - DNA, 17 bp, Homo sapiens
gggccatttaaagatat

SEQ ID NO: 823 - DNA, 17 bp, Homo sapiens
ggccatttaaagatatg

SEQ ID NO: 824 - DNA, 17 bp, Homo sapiens
gccatttaaagatatgg

SEQ ID NO: 825 - DNA, 17 bp, Homo sapiens
ccatttaaagatatggc

SEQ ID NO: 826 - DNA, 17 bp, Homo sapiens
catttaaagatatggcc

SEQ ID NO: 827 - DNA, 17 bp, Homo sapiens
atttaaagatatggccc

SEQ ID NO: 828 - DNA, 17 bp, Homo sapiens
tttaaagatatggccct

SEQ ID NO: 829 - DNA, 17 bp, Homo sapiens
ttaaagatatggccctg

SEQ ID NO: 830 - DNA, 17 bp, Homo sapiens
taaagatatggccctgg

SEQ ID NO: 831 - DNA, 17 bp, Homo sapiens
aaagatatggccctggc

SEQ ID NO: 832 - DNA, 17 bp, Homo sapiens
aagatatggccctggcc

SEQ ID NO: 833 - DNA, 17 bp, Homo sapiens
agatatggccctggcct

SEQ ID NO: 834 - DNA, 17 bp, Homo sapiens
gatatggccctggcctt

SEQ ID NO: 835 - DNA, 17 bp, Homo sapiens
atatggccctggccttc

SEQ ID NO: 836 - DNA, 17 bp, Homo sapiens
tatggccctggccttcc

SEQ ID NO: 837 - DNA, 17 bp, Homo sapiens
atggccctggccttccc

SEQ ID NO: 838 - DNA, 17 bp, Homo sapiens
tggccctggccttccct

SEQ ID NO: 839 - DNA, 17 bp, Homo sapiens
ggccctggccttccctg

SEQ ID NO: 840 - DNA, 17 bp, Homo sapiens
gccctggccttccctga

SEQ ID NO: 841 - DNA, 17 bp, Homo sapiens
ccctggccttccctgag

SEQ ID NO: 842 - DNA, 17 bp, Homo sapiens
cctggccttccctgagg

SEQ ID NO: 843 - DNA, 17 bp, Homo sapiens
ctggccttccctgagga

SEQ ID NO: 844 - DNA, 17 bp, Homo sapiens
tggccttccctgaggag

SEQ ID NO: 845 - DNA, 17 bp, Homo sapiens
ggccttccctgaggagg

SEQ ID NO: 846 - DNA, 17 bp, Homo sapiens
gccttccctgaggagga

SEQ ID NO: 847 - DNA, 17 bp, Homo sapiens
ccttccctgaggaggag

SEQ ID NO: 848 - DNA, 17 bp, Homo sapiens
cttccctgaggaggagt

SEQ ID NO: 849 - DNA, 17 bp, Homo sapiens
ttccctgaggaggagtg

SEQ ID NO: 850 - DNA, 17 bp, Homo sapiens
tccctgaggaggagtgg

SEQ ID NO: 851 - DNA, 17 bp, Homo sapiens
ccctgaggaggagtgga

SEQ ID NO: 852 - DNA, 17 bp, Homo sapiens
cctgaggaggagtggag

SEQ ID NO: 853 - DNA, 17 bp, Homo sapiens
ctgaggaggagtggagg

SEQ ID NO: 854 - DNA, 17 bp, Homo sapiens
tgaggaggagtggaggc

SEQ ID NO: 855 - DNA, 17 bp, Homo sapiens
gaggaggagtggaggca

SEQ ID NO: 856 - DNA, 17 bp, Homo sapiens
aggaggagtggaggcat

SEQ ID NO: 857 - DNA, 17 bp, Homo sapiens
ggaggagtggaggcatg

SEQ ID NO: 858 - DNA, 17 bp, Homo sapiens
gaggagtggaggcatgt

SEQ ID NO: 859 - DNA, 17 bp, Homo sapiens
aggagtggaggcatgtg

SEQ ID NO: 860 - DNA, 17 bp, Homo sapiens
ggagtggaggcatgtga

SEQ ID NO: 861 - DNA, 17 bp, Homo sapiens
gagtggaggcatgtgac

SEQ ID NO: 862 - DNA, 17 bp, Homo sapiens
agtggaggcatgtgacc

SEQ ID NO: 863 - DNA, 17 bp, Homo sapiens
gtggaggcatgtgaccc

SEQ ID NO: 864 - DNA, 17 bp, Homo sapiens
tggaggcatgtgacccc

SEQ ID NO: 865 - DNA, 17 bp, Homo sapiens
ggaggcatgtgacccca

SEQ ID NO: 866 - DNA, 17 bp, Homo sapiens
gaggcatgtgaccccag

SEQ ID NO: 867 - DNA, 17 bp, Homo sapiens
aggcatgtgaccccagc

SEQ ID NO: 868 - DNA, 17 bp, Homo sapiens
ggcatgtgaccccagcc

SEQ ID NO: 869 - DNA, 17 bp, Homo sapiens
gcatgtgaccccagccc

SEQ ID NO: 870 - DNA, 17 bp, Homo sapiens
catgtgaccccagccca

SEQ ID NO: 871 - DNA, 17 bp, Homo sapiens
atgtgaccccagcccag

SEQ ID NO: 872 - DNA, 17 bp, Homo sapiens
tgtgaccccagcccaga

SEQ ID NO: 873 - DNA, 17 bp, Homo sapiens
gtgaccccagcccagat

SEQ ID NO: 874 - DNA, 17 bp, Homo sapiens
tgaccccagcccagata

SEQ ID NO: 875 - DNA, 17 bp, Homo sapiens
gaccccagcccagatag

SEQ ID NO: 876 - DNA, 17 bp, Homo sapiens
accccagcccagataga

SEQ ID NO: 877 - DNA, 17 bp, Homo sapiens
ccccagcccagatagac

SEQ ID NO: 878 - DNA, 17 bp, Homo sapiens
cccagcccagatagact

SEQ ID NO: 879 - DNA, 17 bp, Homo sapiens
ccagcccagatagactg

SEQ ID NO: 880 - DNA, 17 bp, Homo sapiens
cagcccagatagactgc

SEQ ID NO: 881 - DNA, 17 bp, Homo sapiens
agcccagatagactgct

SEQ ID NO: 882 - DNA, 17 bp, Homo sapiens
gcccagatagactgctt

SEQ ID NO: 883 - DNA, 17 bp, Homo sapiens
cccagatagactgcttt

SEQ ID NO: 884 - DNA, 17 bp, Homo sapiens
ccagatagactgctttg

SEQ ID NO: 885 - DNA, 17 bp, Homo sapiens
cagatagactgctttgg

SEQ ID NO: 886 - DNA, 17 bp, Homo sapiens
agatagactgctttggg

SEQ ID NO: 887 - DNA, 17 bp, Homo sapiens
gatagactgctttgggg

SEQ ID NO: 888 - DNA, 17 bp, Homo sapiens
atagactgctttgggga

SEQ ID NO: 889 - DNA, 17 bp, Homo sapiens
tagactgctttggggag

SEQ ID NO: 890 - DNA, 17 bp, Homo sapiens
agactgctttggggagt

SEQ ID NO: 891 - DNA, 17 bp, Homo sapiens
gactgctttggggagta

SEQ ID NO: 892 - DNA, 17 bp, Homo sapiens
actgctttggggagtat

SEQ ID NO: 893 - DNA, 17 bp, Homo sapiens
ctgctttggggagtatg

SEQ ID NO: 894 - DNA, 17 bp, Homo sapiens
tgctttggggagtatgt

SEQ ID NO: 895 - DNA, 17 bp, Homo sapiens
gctttggggagtatgtg

SEQ ID NO: 896 - DNA, 17 bp, Homo sapiens
ctttggggagtatgtgg

SEQ ID NO: 897 - DNA, 17 bp, Homo sapiens
tttggggagtatgtgga

SEQ ID NO: 898 - DNA, 17 bp, Homo sapiens
ttggggagtatgtggaa

SEQ ID NO: 899 - DNA, 17 bp, Homo sapiens
tggggagtatgtggaac

SEQ ID NO: 900 - DNA, 17 bp, Homo sapiens
ggggagtatgtggaacc

SEQ ID NO: 901 - DNA, 17 bp, Homo sapiens
gggagtatgtggaaccg

SEQ ID NO: 902 - DNA, 17 bp, Homo sapiens
ggagtatgtggaaccgc

SEQ ID NO: 903 - DNA, 17 bp, Homo sapiens
gagtatgtggaaccgca

SEQ ID NO: 904 - DNA, 17 bp, Homo sapiens
agtatgtggaaccgcag

SEQ ID NO: 905 - DNA, 17 bp, Homo sapiens
gtatgtggaaccgcagg

SEQ ID NO: 906 - DNA, 17 bp, Homo sapiens
tatgtggaaccgcagga

SEQ ID NO: 907 - DNA, 17 bp, Homo sapiens
atgtggaaccgcaggac

SEQ ID NO: 908 - DNA, 17 bp, Homo sapiens
tgtggaaccgcaggact

SEQ ID NO: 909 - DNA, 17 bp, Homo sapiens
gtggaaccgcaggactg

SEQ ID NO: 910 - DNA, 17 bp, Homo sapiens
tggaaccgcaggactgc

SEQ ID NO: 911 - DNA, 17 bp, Homo sapiens
ggaaccgcaggactgca

SEQ ID NO: 912 - DNA, 17 bp, Homo sapiens
gaaccgcaggactgcag

SEQ ID NO: 913 - DNA, 17 bp, Homo sapiens
aaccgcaggactgcagg

SEQ ID NO: 914 - DNA, 17 bp, Homo sapiens
accgcaggactgcaggg

SEQ ID NO: 915 - DNA, 17 bp, Homo sapiens
ccgcaggactgcagggt

SEQ ID NO: 916 - DNA, 17 bp, Homo sapiens
cgcaggactgcagggtc

SEQ ID NO: 917 - DNA, 17 bp, Homo sapiens
gcaggactgcagggtct

SEQ ID NO: 918 - DNA, 17 bp, Homo sapiens
caggactgcagggtctc

SEQ ID NO: 919 - DNA, 17 bp, Homo sapiens
aggactgcagggtctct

SEQ ID NO: 920 - DNA, 17 bp, Homo sapiens
ggactgcagggtctctc

SEQ ID NO: 921 - DNA, 17 bp, Homo sapiens
gactgcagggtctctcc

SEQ ID NO: 922 - DNA, 17 bp, Homo sapiens
actgcagggtctctcca

SEQ ID NO: 923 - DNA, 17 bp, Homo sapiens
ctgcagggtctctccag

SEQ ID NO: 924 - DNA, 17 bp, Homo sapiens
tgcagggtctctccagg

SEQ ID NO: 925 - DNA, 17 bp, Homo sapiens
gcagggtctctccaggc

SEQ ID NO: 926 - DNA, 17 bp, Homo sapiens
cagggtctctccaggcg

SEQ ID NO: 927 - DNA, 17 bp, Homo sapiens
agggtctctccaggcgg

SEQ ID NO: 928 - DNA, 17 bp, Homo sapiens
gggtctctccaggcggt

SEQ ID NO: 929 - DNA, 17 bp, Homo sapiens
ggtctctccaggcggtg

SEQ ID NO: 930 - DNA, 17 bp, Homo sapiens
gtctctccaggcggtgg

SEQ ID NO: 931 - DNA, 17 bp, Homo sapiens
tctctccaggcggtggg

SEQ ID NO: 932 - DNA, 17 bp, Homo sapiens
ctctccaggcggtggga

SEQ ID NO: 933 - DNA, 17 bp, Homo sapiens
tctccaggcggtgggag

SEQ ID NO: 934 - DNA, 17 bp, Homo sapiens
ctccaggcggtgggagc

SEQ ID NO: 935 - DNA, 17 bp, Homo sapiens
tccaggcggtgggagca

SEQ ID NO: 936 - DNA, 17 bp, Homo sapiens
ccaggcggtgggagcaa

SEQ ID NO: 937 - DNA, 17 bp, Homo sapiens
caggcggtgggagcaag

SEQ ID NO: 938 - DNA, 17 bp, Homo sapiens
aggcggtgggagcaagg

SEQ ID NO: 939 - DNA, 17 bp, Homo sapiens
ggcggtgggagcaagga

SEQ ID NO: 940 - DNA, 17 bp, Homo sapiens
gcggtgggagcaaggaa

SEQ ID NO: 941 - DNA, 17 bp, Homo sapiens
cggtgggagcaaggaaa

SEQ ID NO: 942 - DNA, 17 bp, Homo sapiens
ggtgggagcaaggaaaa

SEQ ID NO: 943 - DNA, 17 bp, Homo sapiens
gtgggagcaaggaaaag

SEQ ID NO: 944 - DNA, 17 bp, Homo sapiens
tgggagcaaggaaaagg

SEQ ID NO: 945 - DNA, 17 bp, Homo sapiens
gggagcaaggaaaagga

SEQ ID NO: 946 - DNA, 17 bp, Homo sapiens
ggagcaaggaaaaggag

SEQ ID NO: 947 - DNA, 17 bp, Homo sapiens
gagcaaggaaaaggagg

SEQ ID NO: 948 - DNA, 17 bp, Homo sapiens
agcaaggaaaaggaggc

SEQ ID NO: 949 - DNA, 17 bp, Homo sapiens
gcaaggaaaaggaggca

SEQ ID NO: 950 - DNA, 17 bp, Homo sapiens
caaggaaaaggaggcaa

SEQ ID NO: 951 - DNA, 17 bp, Homo sapiens
aaggaaaaggaggcaaa

SEQ ID NO: 952 - DNA, 17 bp, Homo sapiens
aggaaaaggaggcaaaa

SEQ ID NO: 953 - DNA, 17 bp, Homo sapiens
ggaaaaggaggcaaaac

SEQ ID NO: 954 - DNA, 17 bp, Homo sapiens
gaaaaggaggcaaaacc

SEQ ID NO: 955 - DNA, 17 bp, Homo sapiens
aaaaggaggcaaaaccc

SEQ ID NO: 956 - DNA, 17 bp, Homo sapiens
aaaggaggcaaaacccc

SEQ ID NO: 957 - DNA, 17 bp, Homo sapiens
aaggaggcaaaaccccc

SEQ ID NO: 958 - DNA, 17 bp, Homo sapiens
aggaggcaaaaccccca

SEQ ID NO: 959 - DNA, 17 bp, Homo sapiens
ggaggcaaaacccccac

SEQ ID NO: 960 - DNA, 17 bp, Homo sapiens
gaggcaaaacccccaca

SEQ ID NO: 961 - DNA, 17 bp, Homo sapiens
aggcaaaacccccacag

SEQ ID NO: 962 - DNA, 17 bp, Homo sapiens
ggcaaaacccccacagg

SEQ ID NO: 963 - DNA, 17 bp, Homo sapiens
gcaaaacccccacagga

SEQ ID NO: 964 - DNA, 17 bp, Homo sapiens
caaaacccccacaggaa

SEQ ID NO: 965 - DNA, 17 bp, Homo sapiens
aaaacccccacaggaag

SEQ ID NO: 966 - DNA, 17 bp, Homo sapiens
aaacccccacaggaaga

SEQ ID NO: 967 - DNA, 17 bp, Homo sapiens
aacccccacaggaagac

SEQ ID NO: 968 - DNA, 17 bp, Homo sapiens
acccccacaggaagacc

SEQ ID NO: 969 - DNA, 17 bp, Homo sapiens
cccccacaggaagacct

SEQ ID NO: 970 - DNA, 17 bp, Homo sapiens
ccccacaggaagacctg

SEQ ID NO: 971 - DNA, 17 bp, Homo sapiens
cccacaggaagacctga

SEQ ID NO: 972 - DNA, 17 bp, Homo sapiens
ccacaggaagacctgaa

SEQ ID NO: 973 - DNA, 17 bp, Homo sapiens
cacaggaagacctgaaa

SEQ ID NO: 974 - DNA, 17 bp, Homo sapiens
acaggaagacctgaaag

SEQ ID NO: 975 - DNA, 17 bp, Homo sapiens
caggaagacctgaaagg

SEQ ID NO: 976 - DNA, 17 bp, Homo sapiens
aggaagacctgaaaggg

SEQ ID NO: 977 - DNA, 17 bp, Homo sapiens
ggaagacctgaaagggg

SEQ ID NO: 978 - DNA, 17 bp, Homo sapiens
gaagacctgaaaggggc

SEQ ID NO: 979 - DNA, 17 bp, Homo sapiens
aagacctgaaaggggcg

SEQ ID NO: 980 - DNA, 17 bp, Homo sapiens
agacctgaaaggggcgc

SEQ ID NO: 981 - DNA, 17 bp, Homo sapiens
gacctgaaaggggcgct

SEQ ID NO: 982 - DNA, 17 bp, Homo sapiens
acctgaaaggggcgctg

SEQ ID NO: 983 - DNA, 17 bp, Homo sapiens
cctgaaaggggcgctgg

SEQ ID NO: 984 - DNA, 17 bp, Homo sapiens
ctgaaaggggcgctggt

SEQ ID NO: 985 - DNA, 17 bp, Homo sapiens
tgaaaggggcgctggtg

SEQ ID NO: 986 - DNA, 17 bp, Homo sapiens
gaaaggggcgctggtgg

SEQ ID NO: 987 - DNA, 17 bp, Homo sapiens
aaaggggcgctggtggc

SEQ ID NO: 988 - DNA, 17 bp, Homo sapiens
aaggggcgctggtggca

SEQ ID NO: 989 - DNA, 17 bp, Homo sapiens
aggggcgctggtggcac

SEQ ID NO: 990 - DNA, 17 bp, Homo sapiens
ggggcgctggtggcact

SEQ ID NO: 991 - DNA, 17 bp, Homo sapiens
gggcgctggtggcactg

SEQ ID NO: 992 - DNA, 17 bp, Homo sapiens
ggcgctggtggcactga

SEQ ID NO: 993 - DNA, 17 bp, Homo sapiens
gcgctggtggcactgac

SEQ ID NO: 994 - DNA, 17 bp, Homo sapiens
cgctggtggcactgaca

SEQ ID NO: 995 - DNA, 17 bp, Homo sapiens
gctggtggcactgacat

SEQ ID NO: 996 - DNA, 17 bp, Homo sapiens
ctggtggcactgacatc

SEQ ID NO: 997 - DNA, 17 bp, Homo sapiens
tggtggcactgacatca

SEQ ID NO: 998 - DNA, 17 bp, Homo sapiens
ggtggcactgacatcag

SEQ ID NO: 999 - DNA, 17 bp, Homo sapiens
gtggcactgacatcaga

SEQ ID NO: 1000 - DNA, 17 bp, Homo sapiens
tggcactgacatcagag

SEQ ID NO: 1001 - DNA, 17 bp, Homo sapiens
ggcactgacatcagaga

SEQ ID NO: 1002 - DNA, 17 bp, Homo sapiens
gcactgacatcagagag

SEQ ID NO: 1003 - DNA, 17 bp, Homo sapiens
cactgacatcagagagg

SEQ ID NO: 1004 - DNA, 17 bp, Homo sapiens
actgacatcagagaggt

SEQ ID NO: 1005 - DNA, 17 bp, Homo sapiens
ctgacatcagagaggtt

SEQ ID NO: 1006 - DNA, 17 bp, Homo sapiens
tgacatcagagaggttt

SEQ ID NO: 1007 - DNA, 17 bp, Homo sapiens
gacatcagagaggtttg

SEQ ID NO: 1008 - DNA, 17 bp, Homo sapiens
acatcagagaggtttgg

SEQ ID NO: 1009 - DNA, 17 bp, Homo sapiens
catcagagaggtttggg

SEQ ID NO: 1010 - DNA, 17 bp, Homo sapiens
atcagagaggtttgggg

SEQ ID NO: 1011 - DNA, 17 bp, Homo sapiens
tcagagaggtttgggga

SEQ ID NO: 1012 - DNA, 17 bp, Homo sapiens
cagagaggtttggggaa

SEQ ID NO: 1013 - DNA, 17 bp, Homo sapiens
agagaggtttggggaag

SEQ ID NO: 1014 - DNA, 17 bp, Homo sapiens
gagaggtttggggaagc

SEQ ID NO: 1015 - DNA, 17 bp, Homo sapiens
agaggtttggggaagcc

SEQ ID NO: 1016 - DNA, 17 bp, Homo sapiens
gaggtttggggaagcct

SEQ ID NO: 1017 - DNA, 17 bp, Homo sapiens
aggtttggggaagcctc

SEQ ID NO: 1018 - DNA, 17 bp, Homo sapiens
ggtttggggaagcctct

SEQ ID NO: 1019 - DNA, 17 bp, Homo sapiens
gtttggggaagcctctc

SEQ ID NO: 1020 - DNA, 17 bp, Homo sapiens
tttggggaagcctctct

SEQ ID NO: 1021 - DNA, 17 bp, Homo sapiens
ttggggaagcctctctc

SEQ ID NO: 1022 - DNA, 17 bp, Homo sapiens
tggggaagcctctctcc

SEQ ID NO: 1023 - DNA, 17 bp, Homo sapiens
ggggaagcctctctcca

SEQ ID NO: 1024 - DNA, 17 bp, Homo sapiens
gggaagcctctctccag

SEQ ID NO: 1025 - DNA, 17 bp, Homo sapiens
ggaagcctctctccagg

SEQ ID NO: 1026 - DNA, 17 bp, Homo sapiens
gaagcctctctccaggg

SEQ ID NO: 1027 - DNA, 17 bp, Homo sapiens
aagcctctctccagggc

SEQ ID NO: 1028 - DNA, 17 bp, Homo sapiens
agcctctctccagggcc

SEQ ID NO: 1029 - DNA, 17 bp, Homo sapiens
gcctctctccagggccc

SEQ ID NO: 1030 - DNA, 17 bp, Homo sapiens
cctctctccagggccct

SEQ ID NO: 1031 - DNA, 17 bp, Homo sapiens
ctctctccagggccctg

SEQ ID NO: 1032 - DNA, 17 bp, Homo sapiens
tctctccagggccctgg

SEQ ID NO: 1033 - DNA, 17 bp, Homo sapiens
ctctccagggccctggg

SEQ ID NO: 1034 - DNA, 17 bp, Homo sapiens
tctccagggccctgggc

SEQ ID NO: 1035 - DNA, 17 bp, Homo sapiens
ctccagggccctgggct

SEQ ID NO: 1036 - DNA, 17 bp, Homo sapiens
tccagggccctgggctc

SEQ ID NO: 1037 - DNA, 17 bp, Homo sapiens
ccagggccctgggctcg

SEQ ID NO: 1038 - DNA, 17 bp, Homo sapiens
cagggccctgggctcgg

SEQ ID NO: 1039 - DNA, 17 bp, Homo sapiens
agggccctgggctcgga

SEQ ID NO: 1040 - DNA, 17 bp, Homo sapiens
gggccctgggctcggaa

SEQ ID NO: 1041 - DNA, 17 bp, Homo sapiens
ggccctgggctcggaag

SEQ ID NO: 1042 - DNA, 17 bp, Homo sapiens
gccctgggctcggaagg

SEQ ID NO: 1043 - DNA, 17 bp, Homo sapiens
ccctgggctcggaaggg

SEQ ID NO: 1044 - DNA, 17 bp, Homo sapiens
cctgggctcggaagggt

SEQ ID NO: 1045 - DNA, 17 bp, Homo sapiens
ctgggctcggaagggtc

SEQ ID NO: 1046 - DNA, 17 bp, Homo sapiens
tgggctcggaagggtct

SEQ ID NO: 1047 - DNA, 17 bp, Homo sapiens
gggctcggaagggtctg

SEQ ID NO: 1048 - DNA, 17 bp, Homo sapiens
ggctcggaagggtctgt

SEQ ID NO: 1049 - DNA, 17 bp, Homo sapiens
gctcggaagggtctgtg

SEQ ID NO: 1050 - DNA, 17 bp, Homo sapiens
ctcggaagggtctgtga

SEQ ID NO: 1051 - DNA, 17 bp, Homo sapiens
tcggaagggtctgtgag

SEQ ID NO: 1052 - DNA, 17 bp, Homo sapiens
cggaagggtctgtgagc

SEQ ID NO: 1053 - DNA, 17 bp, Homo sapiens
ggaagggtctgtgagca

SEQ ID NO: 1054 - DNA, 17 bp, Homo sapiens
gaagggtctgtgagcag

SEQ ID NO: 1055 - DNA, 17 bp, Homo sapiens
aagggtctgtgagcagg

SEQ ID NO: 1056 - DNA, 17 bp, Homo sapiens
agggtctgtgagcagga

SEQ ID NO: 1057 - DNA, 17 bp, Homo sapiens
gggtctgtgagcaggag

SEQ ID NO: 1058 - DNA, 17 bp, Homo sapiens
ggtctgtgagcaggagc

SEQ ID NO: 1059 - DNA, 17 bp, Homo sapiens
gtctgtgagcaggagcc

SEQ ID NO: 1060 - DNA, 17 bp, Homo sapiens
tctgtgagcaggagcct

SEQ ID NO: 1061 - DNA, 17 bp, Homo sapiens
ctgtgagcaggagcctg

SEQ ID NO: 1062 - DNA, 17 bp, Homo sapiens
tgtgagcaggagcctgg

SEQ ID NO: 1063 - DNA, 17 bp, Homo sapiens
gtgagcaggagcctggt

SEQ ID NO: 1064 - DNA, 17 bp, Homo sapiens
tgagcaggagcctggtg

SEQ ID NO: 1065 - DNA, 17 bp, Homo sapiens
gagcaggagcctggtgg

SEQ ID NO: 1066 - DNA, 17 bp, Homo sapiens
agcaggagcctggtggc

SEQ ID NO: 1067 - DNA, 17 bp, Homo sapiens
gcaggagcctggtggcc

SEQ ID NO: 1068 - DNA, 17 bp, Homo sapiens
caggagcctggtggccc

SEQ ID NO: 1069 - DNA, 17 bp, Homo sapiens
aggagcctggtggccct

SEQ ID NO: 1070 - DNA, 17 bp, Homo sapiens
ggagcctggtggccctg

SEQ ID NO: 1071 - DNA, 17 bp, Homo sapiens
gagcctggtggccctgc

SEQ ID NO: 1072 - DNA, 17 bp, Homo sapiens
agcctggtggccctgca

SEQ ID NO: 1073 - DNA, 17 bp, Homo sapiens
gcctggtggccctgcag

SEQ ID NO: 1074 - DNA, 17 bp, Homo sapiens
cctggtggccctgcagg

SEQ ID NO: 1075 - DNA, 17 bp, Homo sapiens
ctggtggccctgcaggc

SEQ ID NO: 1076 - DNA, 17 bp, Homo sapiens
tggtggccctgcaggca

SEQ ID NO: 1077 - DNA, 17 bp, Homo sapiens
ggtggccctgcaggcag

SEQ ID NO: 1078 - DNA, 17 bp, Homo sapiens
gtggccctgcaggcagt

SEQ ID NO: 1079 - DNA, 17 bp, Homo sapiens
tggccctgcaggcagtg

SEQ ID NO: 1080 - DNA, 17 bp, Homo sapiens
ggccctgcaggcagtgc

SEQ ID NO: 1081 - DNA, 17 bp, Homo sapiens
gccctgcaggcagtgcg

SEQ ID NO: 1082 - DNA, 17 bp, Homo sapiens
ccctgcaggcagtgcgc

SEQ ID NO: 1083 - DNA, 17 bp, Homo sapiens
cctgcaggcagtgcgcc

SEQ ID NO: 1084 - DNA, 17 bp, Homo sapiens
ctgcaggcagtgcgcct

SEQ ID NO: 1085 - DNA, 17 bp, Homo sapiens
tgcaggcagtgcgcctg

SEQ ID NO: 1086 - DNA, 17 bp, Homo sapiens
gcaggcagtgcgcctgg

SEQ ID NO: 1087 - DNA, 17 bp, Homo sapiens
caggcagtgcgcctggg

SEQ ID NO: 1088 - DNA, 17 bp, Homo sapiens
aggcagtgcgcctgggc

SEQ ID NO: 1089 - DNA, 17 bp, Homo sapiens
ggcagtgcgcctgggct

SEQ ID NO: 1090 - DNA, 17 bp, Homo sapiens
gcagtgcgcctgggctt

SEQ ID NO: 1091 - DNA, 17 bp, Homo sapiens
cagtgcgcctgggcttc

SEQ ID NO: 1092 - DNA, 17 bp, Homo sapiens
agtgcgcctgggcttcc

SEQ ID NO: 1093 - DNA, 17 bp, Homo sapiens
gtgcgcctgggcttcct

SEQ ID NO: 1094 - DNA, 17 bp, Homo sapiens
tgcgcctgggcttcctc

SEQ ID NO: 1095 - DNA, 17 bp, Homo sapiens
gcgcctgggcttcctcc

SEQ ID NO: 1096 - DNA, 17 bp, Homo sapiens
cgcctgggcttcctcct

SEQ ID NO: 1097 - DNA, 17 bp, Homo sapiens
gcctgggcttcctcctc

SEQ ID NO: 1098 - DNA, 17 bp, Homo sapiens
cctgggcttcctcctcc

SEQ ID NO: 1099 - DNA, 17 bp, Homo sapiens
ctgggcttcctcctccc

SEQ ID NO: 1100 - DNA, 17 bp, Homo sapiens
tgggcttcctcctcccc

SEQ ID NO: 1101 - DNA, 17 bp, Homo sapiens
gggcttcctcctcccca

SEQ ID NO: 1102 - DNA, 17 bp, Homo sapiens
ggcttcctcctccccag

SEQ ID NO: 1103 - DNA, 17 bp, Homo sapiens
gcttcctcctccccagc

SEQ ID NO: 1104 - DNA, 17 bp, Homo sapiens
cttcctcctccccagca

SEQ ID NO: 1105 - DNA, 17 bp, Homo sapiens
ttcctcctccccagcac

SEQ ID NO: 1106 - DNA, 17 bp, Homo sapiens
tcctcctccccagcacg

SEQ ID NO: 1107 - DNA, 17 bp, Homo sapiens
cctcctccccagcacgg

SEQ ID NO: 1108 - DNA, 17 bp, Homo sapiens
ctcctccccagcacggt

SEQ ID NO: 1109 - DNA, 17 bp, Homo sapiens
tcctccccagcacggtg

SEQ ID NO: 1110 - DNA, 17 bp, Homo sapiens
cctccccagcacggtgc

SEQ ID NO: 1111 - DNA, 17 bp, Homo sapiens
ctccccagcacggtgcc

SEQ ID NO: 1112 - DNA, 17 bp, Homo sapiens
tccccagcacggtgcca

SEQ ID NO: 1113 - DNA, 17 bp, Homo sapiens
ccccagcacggtgccat

SEQ ID NO: 1114 - DNA, 17 bp, Homo sapiens
cccagcacggtgccatc

SEQ ID NO: 1115 - DNA, 17 bp, Homo sapiens
ccagcacggtgccatcc

SEQ ID NO: 1116 - DNA, 17 bp, Homo sapiens
cagcacggtgccatccc

SEQ ID NO: 1117 - DNA, 17 bp, Homo sapiens
agcacggtgccatcccc

SEQ ID NO: 1118 - DNA, 17 bp, Homo sapiens
gcacggtgccatccccc

SEQ ID NO: 1119 - DNA, 17 bp, Homo sapiens
cacggtgccatccccct

SEQ ID NO: 1120 - DNA, 17 bp, Homo sapiens
acggtgccatccccctg

SEQ ID NO: 1121 - DNA, 17 bp, Homo sapiens
cggtgccatccccctgc

SEQ ID NO: 1122 - DNA, 17 bp, Homo sapiens
ggtgccatccccctgcc

SEQ ID NO: 1123 - DNA, 17 bp, Homo sapiens
gtgccatccccctgcct

SEQ ID NO: 1124 - DNA, 17 bp, Homo sapiens
tgccatccccctgcctg

SEQ ID NO: 1125 - DNA, 17 bp, Homo sapiens
gccatccccctgcctga

SEQ ID NO: 1126 - DNA, 17 bp, Homo sapiens
ccatccccctgcctgac

SEQ ID NO: 1127 - DNA, 17 bp, Homo sapiens
catccccctgcctgacg

SEQ ID NO: 1128 - DNA, 17 bp, Homo sapiens
atccccctgcctgacga

SEQ ID NO: 1129 - DNA, 17 bp, Homo sapiens
tccccctgcctgacgaa

SEQ ID NO: 1130 - DNA, 17 bp, Homo sapiens
ccccctgcctgacgaag

SEQ ID NO: 1131 - DNA, 17 bp, Homo sapiens
cccctgcctgacgaagt

SEQ ID NO: 1132 - DNA, 17 bp, Homo sapiens
ccctgcctgacgaagtc

SEQ ID NO: 1133 - DNA, 17 bp, Homo sapiens
cctgcctgacgaagtca

SEQ ID NO: 1134 - DNA, 17 bp, Homo sapiens
ctgcctgacgaagtcaa

SEQ ID NO: 1135 - DNA, 17 bp, Homo sapiens
tgcctgacgaagtcaaa

SEQ ID NO: 1136 - DNA, 17 bp, Homo sapiens
gcctgacgaagtcaaaa

SEQ ID NO: 1137 - DNA, 17 bp, Homo sapiens
cctgacgaagtcaaaac

SEQ ID NO: 1138 - DNA, 17 bp, Homo sapiens
ctgacgaagtcaaaacc

SEQ ID NO: 1139 - DNA, 17 bp, Homo sapiens
tgacgaagtcaaaaccc

SEQ ID NO: 1140 - DNA, 17 bp, Homo sapiens
gacgaagtcaaaaccca

SEQ ID NO: 1141 - DNA, 17 bp, Homo sapiens
acgaagtcaaaacccac

SEQ ID NO: 1142 - DNA, 17 bp, Homo sapiens
cgaagtcaaaacccaca

SEQ ID NO: 1143 - DNA, 17 bp, Homo sapiens
gaagtcaaaacccacag

SEQ ID NO: 1144 - DNA, 17 bp, Homo sapiens
aagtcaaaacccacagc

SEQ ID NO: 1145 - DNA, 17 bp, Homo sapiens
agtcaaaacccacagct

SEQ ID NO: 1146 - DNA, 17 bp, Homo sapiens
gtcaaaacccacagctc

SEQ ID NO: 1147 - DNA, 17 bp, Homo sapiens
tcaaaacccacagctcc

SEQ ID NO: 1148 - DNA, 17 bp, Homo sapiens
caaaacccacagctcct

SEQ ID NO: 1149 - DNA, 17 bp, Homo sapiens
aaaacccacagctcctt

SEQ ID NO: 1150 - DNA, 17 bp, Homo sapiens
aaacccacagctccttc

SEQ ID NO: 1151 - DNA, 17 bp, Homo sapiens
aacccacagctccttct

SEQ ID NO: 1152 - DNA, 17 bp, Homo sapiens
acccacagctccttctg

SEQ ID NO: 1153 - DNA, 17 bp, Homo sapiens
cccacagctccttctgg

SEQ ID NO: 1154 - DNA, 17 bp, Homo sapiens
ccacagctccttctgga

SEQ ID NO: 1155 - DNA, 17 bp, Homo sapiens
cacagctccttctggaa

SEQ ID NO: 1156 - DNA, 17 bp, Homo sapiens
acagctccttctggaag

SEQ ID NO: 1157 - DNA, 17 bp, Homo sapiens
cagctccttctggaagc

SEQ ID NO: 1158 - DNA, 17 bp, Homo sapiens
agctccttctggaagcc

SEQ ID NO: 1159 - DNA, 17 bp, Homo sapiens
gctccttctggaagcct

SEQ ID NO: 1160 - DNA, 17 bp, Homo sapiens
ctccttctggaagcctt

SEQ ID NO: 1161 - DNA, 17 bp, Homo sapiens
tccttctggaagccttt

SEQ ID NO: 1162 - DNA, 17 bp, Homo sapiens
ccttctggaagcctttc

SEQ ID NO: 1163 - DNA, 17 bp, Homo sapiens
cttctggaagcctttcc

SEQ ID NO: 1164 - DNA, 17 bp, Homo sapiens
ttctggaagcctttcca

SEQ ID NO: 1165 - DNA, 17 bp, Homo sapiens
tctggaagcctttccag

SEQ ID NO: 1166 - DNA, 17 bp, Homo sapiens
ctggaagcctttccagt

SEQ ID NO: 1167 - DNA, 17 bp, Homo sapiens
tggaagcctttccagtg

SEQ ID NO: 1168 - DNA, 17 bp, Homo sapiens
ggaagcctttccagtgc

SEQ ID NO: 1169 - DNA, 17 bp, Homo sapiens
gaagcctttccagtgcc

SEQ ID NO: 1170 - DNA, 17 bp, Homo sapiens
aagcctttccagtgccc

SEQ ID NO: 1171 - DNA, 17 bp, Homo sapiens
agcctttccagtgccct

SEQ ID NO: 1172 - DNA, 17 bp, Homo sapiens
gcctttccagtgccctg

SEQ ID NO: 1173 - DNA, 17 bp, Homo sapiens
cctttccagtgccctga

SEQ ID NO: 1174 - DNA, 17 bp, Homo sapiens
ctttccagtgccctgag

SEQ ID NO: 1175 - DNA, 17 bp, Homo sapiens
tttccagtgccctgagt

SEQ ID NO: 1176 - DNA, 17 bp, Homo sapiens
ttccagtgccctgagtg

SEQ ID NO: 1177 - DNA, 17 bp, Homo sapiens
tccagtgccctgagtgt

SEQ ID NO: 1178 - DNA, 17 bp, Homo sapiens
ccagtgccctgagtgtg

SEQ ID NO: 1179 - DNA, 17 bp, Homo sapiens
cagtgccctgagtgtgg

SEQ ID NO: 1180 - DNA, 17 bp, Homo sapiens
agtgccctgagtgtggg

SEQ ID NO: 1181 - DNA, 17 bp, Homo sapiens
gtgccctgagtgtggga

SEQ ID NO: 1182 - DNA, 17 bp, Homo sapiens
tgccctgagtgtgggaa

SEQ ID NO: 1183 - DNA, 17 bp, Homo sapiens
gccctgagtgtgggaaa

SEQ ID NO: 1184 - DNA, 17 bp, Homo sapiens
ccctgagtgtgggaaag

SEQ ID NO: 1185 - DNA, 17 bp, Homo sapiens
cctgagtgtgggaaagg

SEQ ID NO: 1186 - DNA, 17 bp, Homo sapiens
ctgagtgtgggaaagga

SEQ ID NO: 1187 - DNA, 17 bp, Homo sapiens
tgagtgtgggaaaggat

SEQ ID NO: 1188 - DNA, 17 bp, Homo sapiens
gagtgtgggaaaggatt

SEQ ID NO: 1189 - DNA, 17 bp, Homo sapiens
agtgtgggaaaggattc

SEQ ID NO: 1190 - DNA, 17 bp, Homo sapiens
gtgtgggaaaggattca

SEQ ID NO: 1191 - DNA, 17 bp, Homo sapiens
tgtgggaaaggattcag

SEQ ID NO: 1192 - DNA, 17 bp, Homo sapiens
gtgggaaaggattcagt

SEQ ID NO: 1193 - DNA, 17 bp, Homo sapiens
tgggaaaggattcagtc

SEQ ID NO: 1194 - DNA, 17 bp, Homo sapiens
gggaaaggattcagtcg

SEQ ID NO: 1195 - DNA, 17 bp, Homo sapiens
ggaaaggattcagtcgg

SEQ ID NO: 1196 - DNA, 17 bp, Homo sapiens
gaaaggattcagtcgga

SEQ ID NO: 1197 - DNA, 17 bp, Homo sapiens
aaaggattcagtcggag

SEQ ID NO: 1198 - DNA, 17 bp, Homo sapiens
aaggattcagtcggagc

SEQ ID NO: 1199 - DNA, 17 bp, Homo sapiens
aggattcagtcggagct

SEQ ID NO: 1200 - DNA, 17 bp, Homo sapiens
ggattcagtcggagctc

SEQ ID NO: 1201 - DNA, 17 bp, Homo sapiens
gattcagtcggagctcc

SEQ ID NO: 1202 - DNA, 17 bp, Homo sapiens
attcagtcggagctcca

SEQ ID NO: 1203 - DNA, 17 bp, Homo sapiens
ttcagtcggagctccaa

SEQ ID NO: 1204 - DNA, 17 bp, Homo sapiens
tcagtcggagctccaat

SEQ ID NO: 1205 - DNA, 17 bp, Homo sapiens
cagtcggagctccaatc

SEQ ID NO: 1206 - DNA, 17 bp, Homo sapiens
agtcggagctccaatct

SEQ ID NO: 1207 - DNA, 17 bp, Homo sapiens
gtcggagctccaatctc

SEQ ID NO: 1208 - DNA, 17 bp, Homo sapiens
tcggagctccaatctcg

SEQ ID NO: 1209 - DNA, 17 bp, Homo sapiens
cggagctccaatctcgt

SEQ ID NO: 1210 - DNA, 17 bp, Homo sapiens
ggagctccaatctcgtc

SEQ ID NO: 1211 - DNA, 17 bp, Homo sapiens
gagctccaatctcgtca

SEQ ID NO: 1212 - DNA, 17 bp, Homo sapiens
agctccaatctcgtcag

SEQ ID NO: 1213 - DNA, 17 bp, Homo sapiens
gctccaatctcgtcagg

SEQ ID NO: 1214 - DNA, 17 bp, Homo sapiens
ctccaatctcgtcaggc

SEQ ID NO: 1215 - DNA, 17 bp, Homo sapiens
tccaatctcgtcaggca

SEQ ID NO: 1216 - DNA, 17 bp, Homo sapiens
ccaatctcgtcaggcac

SEQ ID NO: 1217 - DNA, 17 bp, Homo sapiens
caatctcgtcaggcacc

SEQ ID NO: 1218 - DNA, 17 bp, Homo sapiens
aatctcgtcaggcacca

SEQ ID NO: 1219 - DNA, 17 bp, Homo sapiens
atctcgtcaggcaccag

SEQ ID NO: 1220 - DNA, 17 bp, Homo sapiens
tctcgtcaggcaccagc

SEQ ID NO: 1221 - DNA, 17 bp, Homo sapiens
ctcgtcaggcaccagcg

SEQ ID NO: 1222 - DNA, 17 bp, Homo sapiens
tcgtcaggcaccagcga

SEQ ID NO: 1223 - DNA, 17 bp, Homo sapiens
cgtcaggcaccagcgaa

SEQ ID NO: 1224 - DNA, 17 bp, Homo sapiens
gtcaggcaccagcgaac

SEQ ID NO: 1225 - DNA, 17 bp, Homo sapiens
tcaggcaccagcgaacc

SEQ ID NO: 1226 - DNA, 17 bp, Homo sapiens
caggcaccagcgaaccc

SEQ ID NO: 1227 - DNA, 17 bp, Homo sapiens
aggcaccagcgaaccca

SEQ ID NO: 1228 - DNA, 17 bp, Homo sapiens
ggcaccagcgaacccac

SEQ ID NO: 1229 - DNA, 17 bp, Homo sapiens
gcaccagcgaacccacg

SEQ ID NO: 1230 - DNA, 17 bp, Homo sapiens
caccagcgaacccacga

SEQ ID NO: 1231 - DNA, 17 bp, Homo sapiens
accagcgaacccacgaa

SEQ ID NO: 1232 - DNA, 17 bp, Homo sapiens
ccagcgaacccacgaag

SEQ ID NO: 1233 - DNA, 17 bp, Homo sapiens
cagcgaacccacgaaga

SEQ ID NO: 1234 - DNA, 17 bp, Homo sapiens
agcgaacccacgaagag

SEQ ID NO: 1235 - DNA, 17 bp, Homo sapiens
gcgaacccacgaagaga

SEQ ID NO: 1236 - DNA, 17 bp, Homo sapiens
cgaacccacgaagagaa

SEQ ID NO: 1237 - DNA, 17 bp, Homo sapiens
gaacccacgaagagaag

SEQ ID NO: 1238 - DNA, 17 bp, Homo sapiens
aacccacgaagagaagt

SEQ ID NO: 1239 - DNA, 17 bp, Homo sapiens
acccacgaagagaagtc

SEQ ID NO: 1240 - DNA, 17 bp, Homo sapiens
cccacgaagagaagtct

SEQ ID NO: 1241 - DNA, 17 bp, Homo sapiens
ccacgaagagaagtctt

SEQ ID NO: 1242 - DNA, 17 bp, Homo sapiens
cacgaagagaagtctta

SEQ ID NO: 1243 - DNA, 17 bp, Homo sapiens
acgaagagaagtcttat

SEQ ID NO: 1244 - DNA, 17 bp, Homo sapiens
cgaagagaagtcttatg

SEQ ID NO: 1245 - DNA, 17 bp, Homo sapiens
gaagagaagtcttatgg

SEQ ID NO: 1246 - DNA, 17 bp, Homo sapiens
aagagaagtcttatggc

SEQ ID NO: 1247 - DNA, 17 bp, Homo sapiens
agagaagtcttatggct

SEQ ID NO: 1248 - DNA, 17 bp, Homo sapiens
gagaagtcttatggctg

SEQ ID NO: 1249 - DNA, 17 bp, Homo sapiens
agaagtcttatggctgt

SEQ ID NO: 1250 - DNA, 17 bp, Homo sapiens
gaagtcttatggctgtg

SEQ ID NO: 1251 - DNA, 17 bp, Homo sapiens
aagtcttatggctgtgt

SEQ ID NO: 1252 - DNA, 17 bp, Homo sapiens
agtcttatggctgtgtg

SEQ ID NO: 1253 - DNA, 17 bp, Homo sapiens
gtcttatggctgtgtgg

SEQ ID NO: 1254 - DNA, 17 bp, Homo sapiens
tcttatggctgtgtgga

SEQ ID NO: 1255 - DNA, 17 bp, Homo sapiens
cttatggctgtgtggag

SEQ ID NO: 1256 - DNA, 17 bp, Homo sapiens
ttatggctgtgtggagt

SEQ ID NO: 1257 - DNA, 17 bp, Homo sapiens
tatggctgtgtggagtg

SEQ ID NO: 1258 - DNA, 17 bp, Homo sapiens
atggctgtgtggagtgt

SEQ ID NO: 1259 - DNA, 17 bp, Homo sapiens
tggctgtgtggagtgtg

SEQ ID NO: 1260 - DNA, 17 bp, Homo sapiens
ggctgtgtggagtgtgg

SEQ ID NO: 1261 - DNA, 17 bp, Homo sapiens
gctgtgtggagtgtggg

SEQ ID NO: 1262 - DNA, 17 bp, Homo sapiens
ctgtgtggagtgtggga

SEQ ID NO: 1263 - DNA, 17 bp, Homo sapiens
tgtgtggagtgtgggaa

SEQ ID NO: 1264 - DNA, 17 bp, Homo sapiens
gtgtggagtgtgggaag

SEQ ID NO: 1265 - DNA, 17 bp, Homo sapiens
tgtggagtgtgggaagg

SEQ ID NO: 1266 - DNA, 17 bp, Homo sapiens
gtggagtgtgggaaggg

SEQ ID NO: 1267 - DNA, 17 bp, Homo sapiens
tggagtgtgggaagggc

SEQ ID NO: 1268 - DNA, 17 bp, Homo sapiens
ggagtgtgggaagggct

SEQ ID NO: 1269 - DNA, 17 bp, Homo sapiens
gagtgtgggaagggctt

SEQ ID NO: 1270 - DNA, 17 bp, Homo sapiens
agtgtgggaagggcttt

SEQ ID NO: 1271 - DNA, 17 bp, Homo sapiens
gtgtgggaagggcttta

SEQ ID NO: 1272 - DNA, 17 bp, Homo sapiens
tgtgggaagggctttac

SEQ ID NO: 1273 - DNA, 17 bp, Homo sapiens
gtgggaagggctttacc

SEQ ID NO: 1274 - DNA, 17 bp, Homo sapiens
tgggaagggctttaccc

SEQ ID NO: 1275 - DNA, 17 bp, Homo sapiens
gggaagggctttaccct

SEQ ID NO: 1276 - DNA, 17 bp, Homo sapiens
ggaagggctttaccctg

SEQ ID NO: 1277 - DNA, 17 bp, Homo sapiens
gaagggctttaccctga

SEQ ID NO: 1278 - DNA, 17 bp, Homo sapiens
aagggctttaccctgag

SEQ ID NO: 1279 - DNA, 17 bp, Homo sapiens
agggctttaccctgaga

SEQ ID NO: 1280 - DNA, 17 bp, Homo sapiens
gggctttaccctgagag

SEQ ID NO: 1281 - DNA, 17 bp, Homo sapiens
ggctttaccctgagaga

SEQ ID NO: 1282 - DNA, 17 bp, Homo sapiens
gctttaccctgagagag

SEQ ID NO: 1283 - DNA, 17 bp, Homo sapiens
ctttaccctgagagagt

SEQ ID NO: 1284 - DNA, 17 bp, Homo sapiens
tttaccctgagagagta

SEQ ID NO: 1285 - DNA, 17 bp, Homo sapiens
ttaccctgagagagtac

SEQ ID NO: 1286 - DNA, 17 bp, Homo sapiens
taccctgagagagtacc

SEQ ID NO: 1287 - DNA, 17 bp, Homo sapiens
accctgagagagtacct

SEQ ID NO: 1288 - DNA, 17 bp, Homo sapiens
ccctgagagagtacctg

SEQ ID NO: 1289 - DNA, 17 bp, Homo sapiens
cctgagagagtacctga

SEQ ID NO: 1290 - DNA, 17 bp, Homo sapiens
ctgagagagtacctgat

SEQ ID NO: 1291 - DNA, 17 bp, Homo sapiens
tgagagagtacctgatg

SEQ ID NO: 1292 - DNA, 17 bp, Homo sapiens
gagagagtacctgatga

SEQ ID NO: 1293 - DNA, 17 bp, Homo sapiens
agagagtacctgatgaa

SEQ ID NO: 1294 - DNA, 17 bp, Homo sapiens
gagagtacctgatgaag

SEQ ID NO: 1295 - DNA, 17 bp, Homo sapiens
agagtacctgatgaagc

SEQ ID NO: 1296 - DNA, 17 bp, Homo sapiens
gagtacctgatgaagca

SEQ ID NO: 1297 - DNA, 17 bp, Homo sapiens
agtacctgatgaagcac

SEQ ID NO: 1298 - DNA, 17 bp, Homo sapiens
gtacctgatgaagcacc

SEQ ID NO: 1299 - DNA, 17 bp, Homo sapiens
tacctgatgaagcacca

SEQ ID NO: 1300 - DNA, 17 bp, Homo sapiens
acctgatgaagcaccag

SEQ ID NO: 1301 - DNA, 17 bp, Homo sapiens
cctgatgaagcaccaga

SEQ ID NO: 1302 - DNA, 17 bp, Homo sapiens
ctgatgaagcaccagag

SEQ ID NO: 1303 - DNA, 17 bp, Homo sapiens
tgatgaagcaccagaga

SEQ ID NO: 1304 - DNA, 17 bp, Homo sapiens
gatgaagcaccagagaa

SEQ ID NO: 1305 - DNA, 17 bp, Homo sapiens
atgaagcaccagagaac

SEQ ID NO: 1306 - DNA, 17 bp, Homo sapiens
tgaagcaccagagaacc

SEQ ID NO: 1307 - DNA, 17 bp, Homo sapiens
gaagcaccagagaaccc

SEQ ID NO: 1308 - DNA, 17 bp, Homo sapiens
aagcaccagagaaccca

SEQ ID NO: 1309 - DNA, 17 bp, Homo sapiens
agcaccagagaacccac

SEQ ID NO: 1310 - DNA, 17 bp, Homo sapiens
gcaccagagaacccacc

SEQ ID NO: 1311 - DNA, 17 bp, Homo sapiens
caccagagaacccacct

SEQ ID NO: 1312 - DNA, 17 bp, Homo sapiens
accagagaacccacctg

SEQ ID NO: 1313 - DNA, 17 bp, Homo sapiens
ccagagaacccacctgg

SEQ ID NO: 1314 - DNA, 17 bp, Homo sapiens
cagagaacccacctggg

SEQ ID NO: 1315 - DNA, 17 bp, Homo sapiens
agagaacccacctggga

SEQ ID NO: 1316 - DNA, 17 bp, Homo sapiens
gagaacccacctgggaa

SEQ ID NO: 1317 - DNA, 17 bp, Homo sapiens
agaacccacctgggaaa

SEQ ID NO: 1318 - DNA, 17 bp, Homo sapiens
gaacccacctgggaaag

SEQ ID NO: 1319 - DNA, 17 bp, Homo sapiens
aacccacctgggaaaga

SEQ ID NO: 1320 - DNA, 17 bp, Homo sapiens
acccacctgggaaagag

SEQ ID NO: 1321 - DNA, 17 bp, Homo sapiens
cccacctgggaaagagg

SEQ ID NO: 1322 - DNA, 17 bp, Homo sapiens
ccacctgggaaagaggc

SEQ ID NO: 1323 - DNA, 17 bp, Homo sapiens
cacctgggaaagaggcc

SEQ ID NO: 1324 - DNA, 17 bp, Homo sapiens
acctgggaaagaggccc

SEQ ID NO: 1325 - DNA, 17 bp, Homo sapiens
cctgggaaagaggccct

SEQ ID NO: 1326 - DNA, 17 bp, Homo sapiens
ctgggaaagaggcccta

SEQ ID NO: 1327 - DNA, 17 bp, Homo sapiens
tgggaaagaggccctac

SEQ ID NO: 1328 - DNA, 17 bp, Homo sapiens
gggaaagaggccctacg

SEQ ID NO: 1329 - DNA, 17 bp, Homo sapiens
ggaaagaggccctacgt

SEQ ID NO: 1330 - DNA, 17 bp, Homo sapiens
gaaagaggccctacgtg

SEQ ID NO: 1331 - DNA, 17 bp, Homo sapiens
aaagaggccctacgtgt

SEQ ID NO: 1332 - DNA, 17 bp, Homo sapiens
aagaggccctacgtgtg

SEQ ID NO: 1333 - DNA, 17 bp, Homo sapiens
agaggccctacgtgtgc

SEQ ID NO: 1334 - DNA, 17 bp, Homo sapiens
gaggccctacgtgtgca

SEQ ID NO: 1335 - DNA, 17 bp, Homo sapiens
aggccctacgtgtgcag

SEQ ID NO: 1336 - DNA, 17 bp, Homo sapiens
ggccctacgtgtgcagc

SEQ ID NO: 1337 - DNA, 17 bp, Homo sapiens
gccctacgtgtgcagcg

SEQ ID NO: 1338 - DNA, 17 bp, Homo sapiens
ccctacgtgtgcagcga

SEQ ID NO: 1339 - DNA, 17 bp, Homo sapiens
cctacgtgtgcagcgag

SEQ ID NO: 1340 - DNA, 17 bp, Homo sapiens
ctacgtgtgcagcgagt

SEQ ID NO: 1341 - DNA, 17 bp, Homo sapiens
tacgtgtgcagcgagtg

SEQ ID NO: 1342 - DNA, 17 bp, Homo sapiens
acgtgtgcagcgagtgc

SEQ ID NO: 1343 - DNA, 17 bp, Homo sapiens
cgtgtgcagcgagtgct

SEQ ID NO: 1344 - DNA, 17 bp, Homo sapiens
gtgtgcagcgagtgctg

SEQ ID NO: 1345 - DNA, 17 bp, Homo sapiens
tgtgcagcgagtgctgg

SEQ ID NO: 1346 - DNA, 17 bp, Homo sapiens
gtgcagcgagtgctgga

SEQ ID NO: 1347 - DNA, 17 bp, Homo sapiens
tgcagcgagtgctggaa

SEQ ID NO: 1348 - DNA, 17 bp, Homo sapiens
gcagcgagtgctggaaa

SEQ ID NO: 1349 - DNA, 17 bp, Homo sapiens
cagcgagtgctggaaaa

SEQ ID NO: 1350 - DNA, 17 bp, Homo sapiens
agcgagtgctggaaaac

SEQ ID NO: 1351 - DNA, 17 bp, Homo sapiens
gcgagtgctggaaaacc

SEQ ID NO: 1352 - DNA, 17 bp, Homo sapiens
cgagtgctggaaaacct

SEQ ID NO: 1353 - DNA, 17 bp, Homo sapiens
gagtgctggaaaacctt

SEQ ID NO: 1354 - DNA, 17 bp, Homo sapiens
agtgctggaaaaccttc

SEQ ID NO: 1355 - DNA, 17 bp, Homo sapiens
gtgctggaaaaccttca

SEQ ID NO: 1356 - DNA, 17 bp, Homo sapiens
tgctggaaaaccttcag

SEQ ID NO: 1357 - DNA, 17 bp, Homo sapiens
gctggaaaaccttcagc

SEQ ID NO: 1358 - DNA, 17 bp, Homo sapiens
ctggaaaaccttcagcc

SEQ ID NO: 1359 - DNA, 17 bp, Homo sapiens
tggaaaaccttcagcca

SEQ ID NO: 1360 - DNA, 17 bp, Homo sapiens
ggaaaaccttcagccag

SEQ ID NO: 1361 - DNA, 17 bp, Homo sapiens
gaaaaccttcagccaga

SEQ ID NO: 1362 - DNA, 17 bp, Homo sapiens
aaaaccttcagccagag

SEQ ID NO: 1363 - DNA, 17 bp, Homo sapiens
aaaccttcagccagaga

SEQ ID NO: 1364 - DNA, 17 bp, Homo sapiens
aaccttcagccagagac

SEQ ID NO: 1365 - DNA, 17 bp, Homo sapiens
accttcagccagagaca

SEQ ID NO: 1366 - DNA, 17 bp, Homo sapiens
ccttcagccagagacac

SEQ ID NO: 1367 - DNA, 17 bp, Homo sapiens
cttcagccagagacacc

SEQ ID NO: 1368 - DNA, 17 bp, Homo sapiens
ttcagccagagacacca

SEQ ID NO: 1369 - DNA, 17 bp, Homo sapiens
tcagccagagacaccac

SEQ ID NO: 1370 - DNA, 17 bp, Homo sapiens
cagccagagacaccacc

SEQ ID NO: 1371 - DNA, 17 bp, Homo sapiens
agccagagacaccacct

SEQ ID NO: 1372 - DNA, 17 bp, Homo sapiens
gccagagacaccacctg

SEQ ID NO: 1373 - DNA, 17 bp, Homo sapiens
ccagagacaccacctgg

SEQ ID NO: 1374 - DNA, 17 bp, Homo sapiens
cagagacaccacctgga

SEQ ID NO: 1375 - DNA, 17 bp, Homo sapiens
agagacaccacctggag

SEQ ID NO: 1376 - DNA, 17 bp, Homo sapiens
gagacaccacctggagg

SEQ ID NO: 1377 - DNA, 17 bp, Homo sapiens
agacaccacctggaggt

SEQ ID NO: 1378 - DNA, 17 bp, Homo sapiens
gacaccacctggaggtg

SEQ ID NO: 1379 - DNA, 17 bp, Homo sapiens
acaccacctggaggtgc

SEQ ID NO: 1380 - DNA, 17 bp, Homo sapiens
caccacctggaggtgca

SEQ ID NO: 1381 - DNA, 17 bp, Homo sapiens
accacctggaggtgcac

SEQ ID NO: 1382 - DNA, 17 bp, Homo sapiens
ccacctggaggtgcacc

SEQ ID NO: 1383 - DNA, 17 bp, Homo sapiens
cacctggaggtgcacca

SEQ ID NO: 1384 - DNA, 17 bp, Homo sapiens
acctggaggtgcaccag

SEQ ID NO: 1385 - DNA, 17 bp, Homo sapiens
cctggaggtgcaccagc

SEQ ID NO: 1386 - DNA, 17 bp, Homo sapiens
ctggaggtgcaccagcg

SEQ ID NO: 1387 - DNA, 17 bp, Homo sapiens
tggaggtgcaccagcgc

SEQ ID NO: 1388 - DNA, 17 bp, Homo sapiens
ggaggtgcaccagcgca

SEQ ID NO: 1389 - DNA, 17 bp, Homo sapiens
gaggtgcaccagcgcag

SEQ ID NO: 1390 - DNA, 17 bp, Homo sapiens
aggtgcaccagcgcagc

SEQ ID NO: 1391 - DNA, 17 bp, Homo sapiens
ggtgcaccagcgcagcc

SEQ ID NO: 1392 - DNA, 17 bp, Homo sapiens
gtgcaccagcgcagcca

SEQ ID NO: 1393 - DNA, 17 bp, Homo sapiens
tgcaccagcgcagccac

SEQ ID NO: 1394 - DNA, 17 bp, Homo sapiens
gcaccagcgcagccaca

SEQ ID NO: 1395 - DNA, 17 bp, Homo sapiens
caccagcgcagccacac

SEQ ID NO: 1396 - DNA, 17 bp, Homo sapiens
accagcgcagccacact

SEQ ID NO: 1397 - DNA, 17 bp, Homo sapiens
ccagcgcagccacactg

SEQ ID NO: 1398 - DNA, 17 bp, Homo sapiens
cagcgcagccacactgg

SEQ ID NO: 1399 - DNA, 17 bp, Homo sapiens
agcgcagccacactggg

SEQ ID NO: 1400 - DNA, 17 bp, Homo sapiens
gcgcagccacactgggg

SEQ ID NO: 1401 - DNA, 17 bp, Homo sapiens
cgcagccacactgggga

SEQ ID NO: 1402 - DNA, 17 bp, Homo sapiens
gcagccacactggggag

SEQ ID NO: 1403 - DNA, 17 bp, Homo sapiens
cagccacactggggaga

SEQ ID NO: 1404 - DNA, 17 bp, Homo sapiens
agccacactggggagaa

SEQ ID NO: 1405 - DNA, 17 bp, Homo sapiens
gccacactggggagaag

SEQ ID NO: 1406 - DNA, 17 bp, Homo sapiens
ccacactggggagaagc

SEQ ID NO: 1407 - DNA, 17 bp, Homo sapiens
cacactggggagaagcc

SEQ ID NO: 1408 - DNA, 17 bp, Homo sapiens
acactggggagaagccc

SEQ ID NO: 1409 - DNA, 17 bp, Homo sapiens
cactggggagaagcccc

SEQ ID NO: 1410 - DNA, 17 bp, Homo sapiens
actggggagaagcccca

SEQ ID NO: 1411 - DNA, 17 bp, Homo sapiens
ctggggagaagccccac

SEQ ID NO: 1412 - DNA, 17 bp, Homo sapiens
tggggagaagccccaca

SEQ ID NO: 1413 - DNA, 17 bp, Homo sapiens
ggggagaagccccacaa

SEQ ID NO: 1414 - DNA, 17 bp, Homo sapiens
gggagaagccccacaag

SEQ ID NO: 1415 - DNA, 17 bp, Homo sapiens
ggagaagccccacaagt

SEQ ID NO: 1416 - DNA, 17 bp, Homo sapiens
gagaagccccacaagtg

SEQ ID NO: 1417 - DNA, 17 bp, Homo sapiens
agaagccccacaagtgc

SEQ ID NO: 1418 - DNA, 17 bp, Homo sapiens
gaagccccacaagtgcg

SEQ ID NO: 1419 - DNA, 17 bp, Homo sapiens
aagccccacaagtgcgg

SEQ ID NO: 1420 - DNA, 17 bp, Homo sapiens
agccccacaagtgcggg

SEQ ID NO: 1421 - DNA, 17 bp, Homo sapiens
gccccacaagtgcgggg

SEQ ID NO: 1422 - DNA, 17 bp, Homo sapiens
ccccacaagtgcgggga

SEQ ID NO: 1423 - DNA, 17 bp, Homo sapiens
cccacaagtgcggggac

SEQ ID NO: 1424 - DNA, 17 bp, Homo sapiens
ccacaagtgcggggact

SEQ ID NO: 1425 - DNA, 17 bp, Homo sapiens
cacaagtgcggggactg

SEQ ID NO: 1426 - DNA, 17 bp, Homo sapiens
acaagtgcggggactgc

SEQ ID NO: 1427 - DNA, 17 bp, Homo sapiens
caagtgcggggactgct

SEQ ID NO: 1428 - DNA, 17 bp, Homo sapiens
aagtgcggggactgctg

SEQ ID NO: 1429 - DNA, 17 bp, Homo sapiens
agtgcggggactgctgg

SEQ ID NO: 1430 - DNA, 17 bp, Homo sapiens
gtgcggggactgctgga

SEQ ID NO: 1431 - DNA, 17 bp, Homo sapiens
tgcggggactgctggaa

SEQ ID NO: 1432 - DNA, 17 bp, Homo sapiens
gcggggactgctggaag

SEQ ID NO: 1433 - DNA, 17 bp, Homo sapiens
cggggactgctggaaga

SEQ ID NO: 1434 - DNA, 17 bp, Homo sapiens
ggggactgctggaagag

SEQ ID NO: 1435 - DNA, 17 bp, Homo sapiens
gggactgctggaagagc

SEQ ID NO: 1436 - DNA, 17 bp, Homo sapiens
ggactgctggaagagct

SEQ ID NO: 1437 - DNA, 17 bp, Homo sapiens
gactgctggaagagctt

SEQ ID NO: 1438 - DNA, 17 bp, Homo sapiens
actgctggaagagcttc

SEQ ID NO: 1439 - DNA, 17 bp, Homo sapiens
ctgctggaagagcttca

SEQ ID NO: 1440 - DNA, 17 bp, Homo sapiens
tgctggaagagcttcag

SEQ ID NO: 1441 - DNA, 17 bp, Homo sapiens
gctggaagagcttcagc

SEQ ID NO: 1442 - DNA, 17 bp, Homo sapiens
ctggaagagcttcagcc

SEQ ID NO: 1443 - DNA, 17 bp, Homo sapiens
tggaagagcttcagccg

SEQ ID NO: 1444 - DNA, 17 bp, Homo sapiens
ggaagagcttcagccgc

SEQ ID NO: 1445 - DNA, 17 bp, Homo sapiens
gaagagcttcagccgca

SEQ ID NO: 1446 - DNA, 17 bp, Homo sapiens
aagagcttcagccgcag

SEQ ID NO: 1447 - DNA, 17 bp, Homo sapiens
agagcttcagccgcagg

SEQ ID NO: 1448 - DNA, 17 bp, Homo sapiens
gagcttcagccgcaggc

SEQ ID NO: 1449 - DNA, 17 bp, Homo sapiens
agcttcagccgcaggca

SEQ ID NO: 1450 - DNA, 17 bp, Homo sapiens
gcttcagccgcaggcag

SEQ ID NO: 1451 - DNA, 17 bp, Homo sapiens
cttcagccgcaggcagc

SEQ ID NO: 1452 - DNA, 17 bp, Homo sapiens
ttcagccgcaggcagca

SEQ ID NO: 1453 - DNA, 17 bp, Homo sapiens
tcagccgcaggcagcac

SEQ ID NO: 1454 - DNA, 17 bp, Homo sapiens
cagccgcaggcagcacc

SEQ ID NO: 1455 - DNA, 17 bp, Homo sapiens
agccgcaggcagcacct

SEQ ID NO: 1456 - DNA, 17 bp, Homo sapiens
gccgcaggcagcacctg

SEQ ID NO: 1457 - DNA, 17 bp, Homo sapiens
ccgcaggcagcacctgc

SEQ ID NO: 1458 - DNA, 17 bp, Homo sapiens
cgcaggcagcacctgca

SEQ ID NO: 1459 - DNA, 17 bp, Homo sapiens
gcaggcagcacctgcag

SEQ ID NO: 1460 - DNA, 17 bp, Homo sapiens
caggcagcacctgcagg

SEQ ID NO: 1461 - DNA, 17 bp, Homo sapiens
aggcagcacctgcaggt

SEQ ID NO: 1462 - DNA, 17 bp, Homo sapiens
ggcagcacctgcaggtg

SEQ ID NO: 1463 - DNA, 17 bp, Homo sapiens
gcagcacctgcaggtgc

SEQ ID NO: 1464 - DNA, 17 bp, Homo sapiens
cagcacctgcaggtgca

SEQ ID NO: 1465 - DNA, 17 bp, Homo sapiens
agcacctgcaggtgcac

SEQ ID NO: 1466 - DNA, 17 bp, Homo sapiens
gcacctgcaggtgcacc

SEQ ID NO: 1467 - DNA, 17 bp, Homo sapiens
cacctgcaggtgcaccg

SEQ ID NO: 1468 - DNA, 17 bp, Homo sapiens
acctgcaggtgcaccgg

SEQ ID NO: 1469 - DNA, 17 bp, Homo sapiens
cctgcaggtgcaccgga

SEQ ID NO: 1470 - DNA, 17 bp, Homo sapiens
ctgcaggtgcaccggag

SEQ ID NO: 1471 - DNA, 17 bp, Homo sapiens
tgcaggtgcaccggagg

SEQ ID NO: 1472 - DNA, 17 bp, Homo sapiens
gcaggtgcaccggagga

SEQ ID NO: 1473 - DNA, 17 bp, Homo sapiens
caggtgcaccggaggac

SEQ ID NO: 1474 - DNA, 17 bp, Homo sapiens
aggtgcaccggaggacg

SEQ ID NO: 1475 - DNA, 17 bp, Homo sapiens
ggtgcaccggaggacgc

SEQ ID NO: 1476 - DNA, 17 bp, Homo sapiens
gtgcaccggaggacgca

SEQ ID NO: 1477 - DNA, 17 bp, Homo sapiens
tgcaccggaggacgcac

SEQ ID NO: 1478 - DNA, 17 bp, Homo sapiens
gcaccggaggacgcaca

SEQ ID NO: 1479 - DNA, 17 bp, Homo sapiens
caccggaggacgcacac

SEQ ID NO: 1480 - DNA, 17 bp, Homo sapiens
accggaggacgcacacc

SEQ ID NO: 1481 - DNA, 17 bp, Homo sapiens
ccggaggacgcacaccg

SEQ ID NO: 1482 - DNA, 17 bp, Homo sapiens
cggaggacgcacaccgg

SEQ ID NO: 1483 - DNA, 17 bp, Homo sapiens
ggaggacgcacaccggg

SEQ ID NO: 1484 - DNA, 17 bp, Homo sapiens
gaggacgcacaccgggg

SEQ ID NO: 1485 - DNA, 17 bp, Homo sapiens
aggacgcacaccgggga

SEQ ID NO: 1486 - DNA, 17 bp, Homo sapiens
ggacgcacaccggggag

SEQ ID NO: 1487 - DNA, 17 bp, Homo sapiens
gacgcacaccggggaga

SEQ ID NO: 1488 - DNA, 17 bp, Homo sapiens
acgcacaccggggagaa

SEQ ID NO: 1489 - DNA, 17 bp, Homo sapiens
cgcacaccggggagaag

SEQ ID NO: 1490 - DNA, 17 bp, Homo sapiens
gcacaccggggagaagc

SEQ ID NO: 1491 - DNA, 17 bp, Homo sapiens
cacaccggggagaagcc

SEQ ID NO: 1492 - DNA, 17 bp, Homo sapiens
acaccggggagaagccc

SEQ ID NO: 1493 - DNA, 17 bp, Homo sapiens
caccggggagaagccct

SEQ ID NO: 1494 - DNA, 17 bp, Homo sapiens
accggggagaagcccta

SEQ ID NO: 1495 - DNA, 17 bp, Homo sapiens
ccggggagaagccctac

SEQ ID NO: 1496 - DNA, 17 bp, Homo sapiens
cggggagaagccctaca

SEQ ID NO: 1497 - DNA, 17 bp, Homo sapiens
ggggagaagccctacac

SEQ ID NO: 1498 - DNA, 17 bp, Homo sapiens
gggagaagccctacacc

SEQ ID NO: 1499 - DNA, 17 bp, Homo sapiens
ggagaagccctacacct

SEQ ID NO: 1500 - DNA, 17 bp, Homo sapiens
gagaagccctacacctg

SEQ ID NO: 1501 - DNA, 17 bp, Homo sapiens
agaagccctacacctgc

SEQ ID NO: 1502 - DNA, 17 bp, Homo sapiens
gaagccctacacctgcg

SEQ ID NO: 1503 - DNA, 17 bp, Homo sapiens
aagccctacacctgcga

SEQ ID NO: 1504 - DNA, 17 bp, Homo sapiens
agccctacacctgcgag

SEQ ID NO: 1505 - DNA, 17 bp, Homo sapiens
gccctacacctgcgagt

SEQ ID NO: 1506 - DNA, 17 bp, Homo sapiens
ccctacacctgcgagtg

SEQ ID NO: 1507 - DNA, 17 bp, Homo sapiens
cctacacctgcgagtgt

SEQ ID NO: 1508 - DNA, 17 bp, Homo sapiens
ctacacctgcgagtgtg

SEQ ID NO: 1509 - DNA, 17 bp, Homo sapiens
tacacctgcgagtgtgg

SEQ ID NO: 1510 - DNA, 17 bp, Homo sapiens
acacctgcgagtgtggc

SEQ ID NO: 1511 - DNA, 17 bp, Homo sapiens
cacctgcgagtgtggca

SEQ ID NO: 1512 - DNA, 17 bp, Homo sapiens
acctgcgagtgtggcaa

SEQ ID NO: 1513 - DNA, 17 bp, Homo sapiens
cctgcgagtgtggcaag

SEQ ID NO: 1514 - DNA, 17 bp, Homo sapiens
ctgcgagtgtggcaaga

SEQ ID NO: 1515 - DNA, 17 bp, Homo sapiens
tgcgagtgtggcaagag

SEQ ID NO: 1516 - DNA, 17 bp, Homo sapiens
gcgagtgtggcaagagc

SEQ ID NO: 1517 - DNA, 17 bp, Homo sapiens
cgagtgtggcaagagct

SEQ ID NO: 1518 - DNA, 17 bp, Homo sapiens
gagtgtggcaagagctt

SEQ ID NO: 1519 - DNA, 17 bp, Homo sapiens
agtgtggcaagagcttc

SEQ ID NO: 1520 - DNA, 17 bp, Homo sapiens
gtgtggcaagagcttca

SEQ ID NO: 1521 - DNA, 17 bp, Homo sapiens
tgtggcaagagcttcag

SEQ ID NO: 1522 - DNA, 17 bp, Homo sapiens
gtggcaagagcttcagc

SEQ ID NO: 1523 - DNA, 17 bp, Homo sapiens
tggcaagagcttcagca

SEQ ID NO: 1524 - DNA, 17 bp, Homo sapiens
ggcaagagcttcagcag

SEQ ID NO: 1525 - DNA, 17 bp, Homo sapiens
gcaagagcttcagcagg

SEQ ID NO: 1526 - DNA, 17 bp, Homo sapiens
caagagcttcagcagga

SEQ ID NO: 1527 - DNA, 17 bp, Homo sapiens
aagagcttcagcaggaa

SEQ ID NO: 1528 - DNA, 17 bp, Homo sapiens
agagcttcagcaggaat

SEQ ID NO: 1529 - DNA, 17 bp, Homo sapiens
gagcttcagcaggaatg

SEQ ID NO: 1530 - DNA, 25 bp, Homo sapiens
tttaaaagagttgcttccatttgac

SEQ ID NO: 1531 - DNA, 25 bp, Homo sapiens
ttaaaagagttgcttccatttgact

SEQ ID NO: 1532 - DNA, 25 bp, Homo sapiens
taaaagagttgcttccatttgactt

SEQ ID NO: 1533 - DNA, 25 bp, Homo sapiens
aaaagagttgcttccatttgacttt

SEQ ID NO: 1534 - DNA, 25 bp, Homo sapiens
aaagagttgcttccatttgactttt

SEQ ID NO: 1535 - DNA, 25 bp, Homo sapiens
aagagttgcttccatttgacttttt

SEQ ID NO: 1536 - DNA, 25 bp, Homo sapiens
agagttgcttccatttgactttttc

SEQ ID NO: 1537 - DNA, 25 bp, Homo sapiens
gagttgcttccatttgactttttct

SEQ ID NO: 1538 - DNA, 25 bp, Homo sapiens
agttgcttccatttgactttttctg

SEQ ID NO: 1539 - DNA, 25 bp, Homo sapiens
gttgcttccatttgactttttctgt

SEQ ID NO: 1540 - DNA, 25 bp, Homo sapiens
ttgcttccatttgactttttctgtc

SEQ ID NO: 1541 - DNA, 25 bp, Homo sapiens
tgcttccatttgactttttctgtct

SEQ ID NO: 1542 - DNA, 25 bp, Homo sapiens
gcttccatttgactttttctgtctg

SEQ ID NO: 1543 - DNA, 25 bp, Homo sapiens
cttccatttgactttttctgtctgc

SEQ ID NO: 1544 - DNA, 25 bp, Homo sapiens
ttccatttgactttttctgtctgct

SEQ ID NO: 1545 - DNA, 25 bp, Homo sapiens
tccatttgactttttctgtctgctg

SEQ ID NO: 1546 - DNA, 25 bp, Homo sapiens
ccatttgactttttctgtctgctgt

SEQ ID NO: 1547 - DNA, 25 bp, Homo sapiens
catttgactttttctgtctgctgta

SEQ ID NO: 1548 - DNA, 25 bp, Homo sapiens
atttgactttttctgtctgctgtac

SEQ ID NO: 1549 - DNA, 25 bp, Homo sapiens
tttgactttttctgtctgctgtacc

SEQ ID NO: 1550 - DNA, 25 bp, Homo sapiens
ttgactttttctgtctgctgtacca

SEQ ID NO: 1551 - DNA, 25 bp, Homo sapiens
tgactttttctgtctgctgtaccaa

SEQ ID NO: 1552 - DNA, 25 bp, Homo sapiens
gactttttctgtctgctgtaccaac

SEQ ID NO: 1553 - DNA, 25 bp, Homo sapiens
actttttctgtctgctgtaccaaca

SEQ ID NO: 1554 - DNA, 25 bp, Homo sapiens
ctttttctgtctgctgtaccaacat

SEQ ID NO: 1555 - DNA, 25 bp, Homo sapiens
tttttctgtctgctgtaccaacata

SEQ ID NO: 1556 - DNA, 25 bp, Homo sapiens
ttttctgtctgctgtaccaacatat

SEQ ID NO: 1557 - DNA, 25 bp, Homo sapiens
tttctgtctgctgtaccaacatatg

SEQ ID NO: 1558 - DNA, 25 bp, Homo sapiens
ttctgtctgctgtaccaacatatga

SEQ ID NO: 1559 - DNA, 25 bp, Homo sapiens
tctgtctgctgtaccaacatatgag

SEQ ID NO: 1560 - DNA, 25 bp, Homo sapiens
ctgtctgctgtaccaacatatgagt

SEQ ID NO: 1561 - DNA, 25 bp, Homo sapiens
tgtctgctgtaccaacatatgagtt

SEQ ID NO: 1562 - DNA, 25 bp, Homo sapiens
gtctgctgtaccaacatatgagttt

SEQ ID NO: 1563 - DNA, 25 bp, Homo sapiens
tctgctgtaccaacatatgagtttc

SEQ ID NO: 1564 - DNA, 25 bp, Homo sapiens
ctgctgtaccaacatatgagtttca

SEQ ID NO: 1565 - DNA, 25 bp, Homo sapiens
tgctgtaccaacatatgagtttcag

SEQ ID NO: 1566 - DNA, 25 bp, Homo sapiens
gctgtaccaacatatgagtttcagg

SEQ ID NO: 1567 - DNA, 25 bp, Homo sapiens
ctgtaccaacatatgagtttcagga

SEQ ID NO: 1568 - DNA, 25 bp, Homo sapiens
tgtaccaacatatgagtttcaggag

SEQ ID NO: 1569 - DNA, 25 bp, Homo sapiens
gtaccaacatatgagtttcaggagg

SEQ ID NO: 1570 - DNA, 25 bp, Homo sapiens
taccaacatatgagtttcaggaggg

SEQ ID NO: 1571 - DNA, 25 bp, Homo sapiens
accaacatatgagtttcaggagggg

SEQ ID NO: 1572 - DNA, 25 bp, Homo sapiens
ccaacatatgagtttcaggaggggt

SEQ ID NO: 1573 - DNA, 25 bp, Homo sapiens
caacatatgagtttcaggaggggtc

SEQ ID NO: 1574 - DNA, 25 bp, Homo sapiens
aacatatgagtttcaggaggggtca

SEQ ID NO: 1575 - DNA, 25 bp, Homo sapiens
acatatgagtttcaggaggggtcat

SEQ ID NO: 1576 - DNA, 25 bp, Homo sapiens
catatgagtttcaggaggggtcatt

SEQ ID NO: 1577 - DNA, 25 bp, Homo sapiens
atatgagtttcaggaggggtcattg

SEQ ID NO: 1578 - DNA, 25 bp, Homo sapiens
tatgagtttcaggaggggtcattga

SEQ ID NO: 1579 - DNA, 25 bp, Homo sapiens
atgagtttcaggaggggtcattgat

SEQ ID NO: 1580 - DNA, 25 bp, Homo sapiens
tgagtttcaggaggggtcattgatg

SEQ ID NO: 1581 - DNA, 25 bp, Homo sapiens
gagtttcaggaggggtcattgatgc

SEQ ID NO: 1582 - DNA, 25 bp, Homo sapiens
agtttcaggaggggtcattgatgca

SEQ ID NO: 1583 - DNA, 25 bp, Homo sapiens
gtttcaggaggggtcattgatgcag

SEQ ID NO: 1584 - DNA, 25 bp, Homo sapiens
tttcaggaggggtcattgatgcagt

SEQ ID NO: 1585 - DNA, 25 bp, Homo sapiens
ttcaggaggggtcattgatgcagtc

SEQ ID NO: 1586 - DNA, 25 bp, Homo sapiens
tcaggaggggtcattgatgcagtca

SEQ ID NO: 1587 - DNA, 25 bp, Homo sapiens
caggaggggtcattgatgcagtcat

SEQ ID NO: 1588 - DNA, 25 bp, Homo sapiens
aggaggggtcattgatgcagtcatt

SEQ ID NO: 1589 - DNA, 25 bp, Homo sapiens
ggaggggtcattgatgcagtcattc

SEQ ID NO: 1590 - DNA, 25 bp, Homo sapiens
gaggggtcattgatgcagtcattct

SEQ ID NO: 1591 - DNA, 25 bp, Homo sapiens
aggggtcattgatgcagtcattctc

SEQ ID NO: 1592 - DNA, 25 bp, Homo sapiens
ggggtcattgatgcagtcattctca

SEQ ID NO: 1593 - DNA, 25 bp, Homo sapiens
gggtcattgatgcagtcattctcag

SEQ ID NO: 1594 - DNA, 25 bp, Homo sapiens
ggtcattgatgcagtcattctcagt

SEQ ID NO: 1595 - DNA, 25 bp, Homo sapiens
gtcattgatgcagtcattctcagtc

SEQ ID NO: 1596 - DNA, 25 bp, Homo sapiens
tcattgatgcagtcattctcagtct

SEQ ID NO: 1597 - DNA, 25 bp, Homo sapiens
cattgatgcagtcattctcagtctc

SEQ ID NO: 1598 - DNA, 25 bp, Homo sapiens
attgatgcagtcattctcagtctcc

SEQ ID NO: 1599 - DNA, 25 bp, Homo sapiens
ttgatgcagtcattctcagtctcct

SEQ ID NO: 1600 - DNA, 25 bp, Homo sapiens
tgatgcagtcattctcagtctcctc

SEQ ID NO: 1601 - DNA, 25 bp, Homo sapiens
gatgcagtcattctcagtctcctcg

SEQ ID NO: 1602 - DNA, 25 bp, Homo sapiens
atgcagtcattctcagtctcctcgg

SEQ ID NO: 1603 - DNA, 25 bp, Homo sapiens
tgcagtcattctcagtctcctcgga

SEQ ID NO: 1604 - DNA, 25 bp, Homo sapiens
gcagtcattctcagtctcctcggag

SEQ ID NO: 1605 - DNA, 25 bp, Homo sapiens
cagtcattctcagtctcctcggagg

SEQ ID NO: 1606 - DNA, 25 bp, Homo sapiens
agtcattctcagtctcctcggaggg

SEQ ID NO: 1607 - DNA, 25 bp, Homo sapiens
gtcattctcagtctcctcggaggga

SEQ ID NO: 1608 - DNA, 25 bp, Homo sapiens
tcattctcagtctcctcggagggag

SEQ ID NO: 1609 - DNA, 25 bp, Homo sapiens
cattctcagtctcctcggagggagt

SEQ ID NO: 1610 - DNA, 25 bp, Homo sapiens
attctcagtctcctcggagggagtc

SEQ ID NO: 1611 - DNA, 25 bp, Homo sapiens
ttctcagtctcctcggagggagtct

SEQ ID NO: 1612 - DNA, 25 bp, Homo sapiens
tctcagtctcctcggagggagtctg

SEQ ID NO: 1613 - DNA, 25 bp, Homo sapiens
ctcagtctcctcggagggagtctga

SEQ ID NO: 1614 - DNA, 25 bp, Homo sapiens
tcagtctcctcggagggagtctgaa

SEQ ID NO: 1615 - DNA, 25 bp, Homo sapiens
cagtctcctcggagggagtctgaag

SEQ ID NO: 1616 - DNA, 25 bp, Homo sapiens
agtctcctcggagggagtctgaaga

SEQ ID NO: 1617 - DNA, 25 bp, Homo sapiens
gtctcctcggagggagtctgaagat

SEQ ID NO: 1618 - DNA, 25 bp, Homo sapiens
tctcctcggagggagtctgaagatg

SEQ ID NO: 1619 - DNA, 25 bp, Homo sapiens
ctcctcggagggagtctgaagatgc

SEQ ID NO: 1620 - DNA, 25 bp, Homo sapiens
tcctcggagggagtctgaagatgct

SEQ ID NO: 1621 - DNA, 25 bp, Homo sapiens
cctcggagggagtctgaagatgctt

SEQ ID NO: 1622 - DNA, 25 bp, Homo sapiens
ctcggagggagtctgaagatgctta

SEQ ID NO: 1623 - DNA, 25 bp, Homo sapiens
tcggagggagtctgaagatgcttaa

SEQ ID NO: 1624 - DNA, 25 bp, Homo sapiens
cggagggagtctgaagatgcttaaa

SEQ ID NO: 1625 - DNA, 25 bp, Homo sapiens
ggagggagtctgaagatgcttaaag

SEQ ID NO: 1626 - DNA, 25 bp, Homo sapiens
gagggagtctgaagatgcttaaaga

SEQ ID NO: 1627 - DNA, 25 bp, Homo sapiens
agggagtctgaagatgcttaaagag

SEQ ID NO: 1628 - DNA, 25 bp, Homo sapiens
gggagtctgaagatgcttaaagagc

SEQ ID NO: 1629 - DNA, 25 bp, Homo sapiens
ggagtctgaagatgcttaaagagca

SEQ ID NO: 1630 - DNA, 25 bp, Homo sapiens
gagtctgaagatgcttaaagagcat

SEQ ID NO: 1631 - DNA, 25 bp, Homo sapiens
agtctgaagatgcttaaagagcatc

SEQ ID NO: 1632 - DNA, 25 bp, Homo sapiens
gtctgaagatgcttaaagagcatcc

SEQ ID NO: 1633 - DNA, 25 bp, Homo sapiens
tctgaagatgcttaaagagcatcca

SEQ ID NO: 1634 - DNA, 25 bp, Homo sapiens
ctgaagatgcttaaagagcatccag

SEQ ID NO: 1635 - DNA, 25 bp, Homo sapiens
tgaagatgcttaaagagcatccaga

SEQ ID NO: 1636 - DNA, 25 bp, Homo sapiens
gaagatgcttaaagagcatccagag

SEQ ID NO: 1637 - DNA, 25 bp, Homo sapiens
aagatgcttaaagagcatccagaga

SEQ ID NO: 1638 - DNA, 25 bp, Homo sapiens
agatgcttaaagagcatccagagat

SEQ ID NO: 1639 - DNA, 25 bp, Homo sapiens
gatgcttaaagagcatccagagatg

SEQ ID NO: 1640 - DNA, 25 bp, Homo sapiens
atgcttaaagagcatccagagatgg

SEQ ID NO: 1641 - DNA, 25 bp, Homo sapiens
tgcttaaagagcatccagagatggc

SEQ ID NO: 1642 - DNA, 25 bp, Homo sapiens
gcttaaagagcatccagagatggcg

SEQ ID NO: 1643 - DNA, 25 bp, Homo sapiens
cttaaagagcatccagagatggcgg

SEQ ID NO: 1644 - DNA, 25 bp, Homo sapiens
ttaaagagcatccagagatggcgga

SEQ ID NO: 1645 - DNA, 25 bp, Homo sapiens
taaagagcatccagagatggcggaa

SEQ ID NO: 1646 - DNA, 25 bp, Homo sapiens
aaagagcatccagagatggcggaag

SEQ ID NO: 1647 - DNA, 25 bp, Homo sapiens
aagagcatccagagatggcggaagc

SEQ ID NO: 1648 - DNA, 25 bp, Homo sapiens
agagcatccagagatggcggaagct

SEQ ID NO: 1649 - DNA, 25 bp, Homo sapiens
gagcatccagagatggcggaagctc

SEQ ID NO: 1650 - DNA, 25 bp, Homo sapiens
agcatccagagatggcggaagctcc

SEQ ID NO: 1651 - DNA, 25 bp, Homo sapiens
gcatccagagatggcggaagctcct

SEQ ID NO: 1652 - DNA, 25 bp, Homo sapiens
catccagagatggcggaagctcctc

SEQ ID NO: 1653 - DNA, 25 bp, Homo sapiens
atccagagatggcggaagctcctca

SEQ ID NO: 1654 - DNA, 25 bp, Homo sapiens
tccagagatggcggaagctcctcag

SEQ ID NO: 1655 - DNA, 25 bp, Homo sapiens
ccagagatggcggaagctcctcagc

SEQ ID NO: 1656 - DNA, 25 bp, Homo sapiens
cagagatggcggaagctcctcagca

SEQ ID NO: 1657 - DNA, 25 bp, Homo sapiens
agagatggcggaagctcctcagcag

SEQ ID NO: 1658 - DNA, 25 bp, Homo sapiens
gagatggcggaagctcctcagcagc

SEQ ID NO: 1659 - DNA, 25 bp, Homo sapiens
agatggcggaagctcctcagcagca

SEQ ID NO: 1660 - DNA, 25 bp, Homo sapiens
gatggcggaagctcctcagcagcag

SEQ ID NO: 1661 - DNA, 25 bp, Homo sapiens
atggcggaagctcctcagcagcagt

SEQ ID NO: 1662 - DNA, 25 bp, Homo sapiens
tggcggaagctcctcagcagcagtt

SEQ ID NO: 1663 - DNA, 25 bp, Homo sapiens
ggcggaagctcctcagcagcagttg

SEQ ID NO: 1664 - DNA, 25 bp, Homo sapiens
gcggaagctcctcagcagcagttgg

SEQ ID NO: 1665 - DNA, 25 bp, Homo sapiens
cggaagctcctcagcagcagttggg

SEQ ID NO: 1666 - DNA, 25 bp, Homo sapiens
ggaagctcctcagcagcagttgggt

SEQ ID NO: 1667 - DNA, 25 bp, Homo sapiens
gaagctcctcagcagcagttgggta

SEQ ID NO: 1668 - DNA, 25 bp, Homo sapiens
aagctcctcagcagcagttgggtat

SEQ ID NO: 1669 - DNA, 25 bp, Homo sapiens
agctcctcagcagcagttgggtatt

SEQ ID NO: 1670 - DNA, 25 bp, Homo sapiens
gctcctcagcagcagttgggtattc

SEQ ID NO: 1671 - DNA, 25 bp, Homo sapiens
ctcctcagcagcagttgggtattcc

SEQ ID NO: 1672 - DNA, 25 bp, Homo sapiens
tcctcagcagcagttgggtattcct

SEQ ID NO: 1673 - DNA, 25 bp, Homo sapiens
cctcagcagcagttgggtattcctg

SEQ ID NO: 1674 - DNA, 25 bp, Homo sapiens
ctcagcagcagttgggtattcctgt

SEQ ID NO: 1675 - DNA, 25 bp, Homo sapiens
tcagcagcagttgggtattcctgtg

SEQ ID NO: 1676 - DNA, 25 bp, Homo sapiens
cagcagcagttgggtattcctgtgg

SEQ ID NO: 1677 - DNA, 25 bp, Homo sapiens
agcagcagttgggtattcctgtggt

SEQ ID NO: 1678 - DNA, 25 bp, Homo sapiens
gcagcagttgggtattcctgtggtg

SEQ ID NO: 1679 - DNA, 25 bp, Homo sapiens
cagcagttgggtattcctgtggtga

SEQ ID NO: 1680 - DNA, 25 bp, Homo sapiens
agcagttgggtattcctgtggtgaa

SEQ ID NO: 1681 - DNA, 25 bp, Homo sapiens
gcagttgggtattcctgtggtgaaa

SEQ ID NO: 1682 - DNA, 25 bp, Homo sapiens
cagttgggtattcctgtggtgaaac

SEQ ID NO: 1683 - DNA, 25 bp, Homo sapiens
agttgggtattcctgtggtgaaact

SEQ ID NO: 1684 - DNA, 25 bp, Homo sapiens
gttgggtattcctgtggtgaaactg

SEQ ID NO: 1685 - DNA, 25 bp, Homo sapiens
ttgggtattcctgtggtgaaactgg

SEQ ID NO: 1686 - DNA, 25 bp, Homo sapiens
tgggtattcctgtggtgaaactgga

SEQ ID NO: 1687 - DNA, 25 bp, Homo sapiens
gggtattcctgtggtgaaactggag

SEQ ID NO: 1688 - DNA, 25 bp, Homo sapiens
ggtattcctgtggtgaaactggaga

SEQ ID NO: 1689 - DNA, 25 bp, Homo sapiens
gtattcctgtggtgaaactggagaa

SEQ ID NO: 1690 - DNA, 25 bp, Homo sapiens
tattcctgtggtgaaactggagaaa

SEQ ID NO: 1691 - DNA, 25 bp, Homo sapiens
attcctgtggtgaaactggagaaag

SEQ ID NO: 1692 - DNA, 25 bp, Homo sapiens
ttcctgtggtgaaactggagaaaga

SEQ ID NO: 1693 - DNA, 25 bp, Homo sapiens
tcctgtggtgaaactggagaaagag

SEQ ID NO: 1694 - DNA, 25 bp, Homo sapiens
cctgtggtgaaactggagaaagagt

SEQ ID NO: 1695 - DNA, 25 bp, Homo sapiens
ctgtggtgaaactggagaaagagtt

SEQ ID NO: 1696 - DNA, 25 bp, Homo sapiens
tgtggtgaaactggagaaagagttg

SEQ ID NO: 1697 - DNA, 25 bp, Homo sapiens
gtggtgaaactggagaaagagttgc

SEQ ID NO: 1698 - DNA, 25 bp, Homo sapiens
tggtgaaactggagaaagagttgcc

SEQ ID NO: 1699 - DNA, 25 bp, Homo sapiens
ggtgaaactggagaaagagttgcca

SEQ ID NO: 1700 - DNA, 25 bp, Homo sapiens
gtgaaactggagaaagagttgccat

SEQ ID NO: 1701 - DNA, 25 bp, Homo sapiens
tgaaactggagaaagagttgccatg

SEQ ID NO: 1702 - DNA, 25 bp, Homo sapiens
gaaactggagaaagagttgccatgg

SEQ ID NO: 1703 - DNA, 25 bp, Homo sapiens
aaactggagaaagagttgccatggg

SEQ ID NO: 1704 - DNA, 25 bp, Homo sapiens
aactggagaaagagttgccatgggg

SEQ ID NO: 1705 - DNA, 25 bp, Homo sapiens
actggagaaagagttgccatggggc

SEQ ID NO: 1706 - DNA, 25 bp, Homo sapiens
ctggagaaagagttgccatggggca

SEQ ID NO: 1707 - DNA, 25 bp, Homo sapiens
tggagaaagagttgccatggggcag

SEQ ID NO: 1708 - DNA, 25 bp, Homo sapiens
ggagaaagagttgccatggggcaga

SEQ ID NO: 1709 - DNA, 25 bp, Homo sapiens
gagaaagagttgccatggggcagag

SEQ ID NO: 1710 - DNA, 25 bp, Homo sapiens
agaaagagttgccatggggcagagg

SEQ ID NO: 1711 - DNA, 25 bp, Homo sapiens
gaaagagttgccatggggcagagga

SEQ ID NO: 1712 - DNA, 25 bp, Homo sapiens
aaagagttgccatggggcagaggaa

SEQ ID NO: 1713 - DNA, 25 bp, Homo sapiens
aagagttgccatggggcagaggaag

SEQ ID NO: 1714 - DNA, 25 bp, Homo sapiens
agagttgccatggggcagaggaagg

SEQ ID NO: 1715 - DNA, 25 bp, Homo sapiens
gagttgccatggggcagaggaaggg

SEQ ID NO: 1716 - DNA, 25 bp, Homo sapiens
agttgccatggggcagaggaaggga

SEQ ID NO: 1717 - DNA, 25 bp, Homo sapiens
gttgccatggggcagaggaagggag

SEQ ID NO: 1718 - DNA, 25 bp, Homo sapiens
ttgccatggggcagaggaagggagg

SEQ ID NO: 1719 - DNA, 25 bp, Homo sapiens
tgccatggggcagaggaagggagga

SEQ ID NO: 1720 - DNA, 25 bp, Homo sapiens
gccatggggcagaggaagggaggac

SEQ ID NO: 1721 - DNA, 25 bp, Homo sapiens
ccatggggcagaggaagggaggacc

SEQ ID NO: 1722 - DNA, 25 bp, Homo sapiens
catggggcagaggaagggaggaccc

SEQ ID NO: 1723 - DNA, 25 bp, Homo sapiens
atggggcagaggaagggaggaccct

SEQ ID NO: 1724 - DNA, 25 bp, Homo sapiens
tggggcagaggaagggaggacccta

SEQ ID NO: 1725 - DNA, 25 bp, Homo sapiens
ggggcagaggaagggaggaccctag

SEQ ID NO: 1726 - DNA, 25 bp, Homo sapiens
gggcagaggaagggaggaccctagt

SEQ ID NO: 1727 - DNA, 25 bp, Homo sapiens
ggcagaggaagggaggaccctagtc

SEQ ID NO: 1728 - DNA, 25 bp, Homo sapiens
gcagaggaagggaggaccctagtcc

SEQ ID NO: 1729 - DNA, 25 bp, Homo sapiens
cagaggaagggaggaccctagtcca

SEQ ID NO: 1730 - DNA, 25 bp, Homo sapiens
agaggaagggaggaccctagtccag

SEQ ID NO: 1731 - DNA, 25 bp, Homo sapiens
gaggaagggaggaccctagtccaga

SEQ ID NO: 1732 - DNA, 25 bp, Homo sapiens
aggaagggaggaccctagtccagag

SEQ ID NO: 1733 - DNA, 25 bp, Homo sapiens
ggaagggaggaccctagtccagaga

SEQ ID NO: 1734 - DNA, 25 bp, Homo sapiens
gaagggaggaccctagtccagagac

SEQ ID NO: 1735 - DNA, 25 bp, Homo sapiens
aagggaggaccctagtccagagact

SEQ ID NO: 1736 - DNA, 25 bp, Homo sapiens
agggaggaccctagtccagagactt

SEQ ID NO: 1737 - DNA, 25 bp, Homo sapiens
gggaggaccctagtccagagacttt

SEQ ID NO: 1738 - DNA, 25 bp, Homo sapiens
ggaggaccctagtccagagactttt

SEQ ID NO: 1739 - DNA, 25 bp, Homo sapiens
gaggaccctagtccagagacttttc

SEQ ID NO: 1740 - DNA, 25 bp, Homo sapiens
aggaccctagtccagagacttttcg

SEQ ID NO: 1741 - DNA, 25 bp, Homo sapiens
ggaccctagtccagagacttttcgg

SEQ ID NO: 1742 - DNA, 25 bp, Homo sapiens
gaccctagtccagagacttttcggc

SEQ ID NO: 1743 - DNA, 25 bp, Homo sapiens
accctagtccagagacttttcggct

SEQ ID NO: 1744 - DNA, 25 bp, Homo sapiens
ccctagtccagagacttttcggctg

SEQ ID NO: 1745 - DNA, 25 bp, Homo sapiens
cctagtccagagacttttcggctga

SEQ ID NO: 1746 - DNA, 25 bp, Homo sapiens
ctagtccagagacttttcggctgag

SEQ ID NO: 1747 - DNA, 25 bp, Homo sapiens
tagtccagagacttttcggctgagg

SEQ ID NO: 1748 - DNA, 25 bp, Homo sapiens
agtccagagacttttcggctgaggt

SEQ ID NO: 1749 - DNA, 25 bp, Homo sapiens
gtccagagacttttcggctgaggtt

SEQ ID NO: 1750 - DNA, 25 bp, Homo sapiens
tccagagacttttcggctgaggttt

SEQ ID NO: 1751 - DNA, 25 bp, Homo sapiens
ccagagacttttcggctgaggtttc

SEQ ID NO: 1752 - DNA, 25 bp, Homo sapiens
cagagacttttcggctgaggtttcg

SEQ ID NO: 1753 - DNA, 25 bp, Homo sapiens
agagacttttcggctgaggtttcgg

SEQ ID NO: 1754 - DNA, 25 bp, Homo sapiens
gagacttttcggctgaggtttcggc

SEQ ID NO: 1755 - DNA, 25 bp, Homo sapiens
agacttttcggctgaggtttcggca

SEQ ID NO: 1756 - DNA, 25 bp, Homo sapiens
gacttttcggctgaggtttcggcag

SEQ ID NO: 1757 - DNA, 25 bp, Homo sapiens
acttttcggctgaggtttcggcagt

SEQ ID NO: 1758 - DNA, 25 bp, Homo sapiens
cttttcggctgaggtttcggcagtt

SEQ ID NO: 1759 - DNA, 25 bp, Homo sapiens
ttttcggctgaggtttcggcagttc

SEQ ID NO: 1760 - DNA, 25 bp, Homo sapiens
tttcggctgaggtttcggcagttcc

SEQ ID NO: 1761 - DNA, 25 bp, Homo sapiens
ttcggctgaggtttcggcagttccg

SEQ ID NO: 1762 - DNA, 25 bp, Homo sapiens
tcggctgaggtttcggcagttccgc

SEQ ID NO: 1763 - DNA, 25 bp, Homo sapiens
cggctgaggtttcggcagttccgct

SEQ ID NO: 1764 - DNA, 25 bp, Homo sapiens
ggctgaggtttcggcagttccgcta

SEQ ID NO: 1765 - DNA, 25 bp, Homo sapiens
gctgaggtttcggcagttccgctac

SEQ ID NO: 1766 - DNA, 25 bp, Homo sapiens
ctgaggtttcggcagttccgctacc

SEQ ID NO: 1767 - DNA, 25 bp, Homo sapiens
tgaggtttcggcagttccgctacca

SEQ ID NO: 1768 - DNA, 25 bp, Homo sapiens
gaggtttcggcagttccgctaccag

SEQ ID NO: 1769 - DNA, 25 bp, Homo sapiens
aggtttcggcagttccgctaccagg

SEQ ID NO: 1770 - DNA, 25 bp, Homo sapiens
ggtttcggcagttccgctaccagga

SEQ ID NO: 1771 - DNA, 25 bp, Homo sapiens
gtttcggcagttccgctaccaggag

SEQ ID NO: 1772 - DNA, 25 bp, Homo sapiens
tttcggcagttccgctaccaggagg

SEQ ID NO: 1773 - DNA, 25 bp, Homo sapiens
ttcggcagttccgctaccaggaggc

SEQ ID NO: 1774 - DNA, 25 bp, Homo sapiens
tcggcagttccgctaccaggaggca

SEQ ID NO: 1775 - DNA, 25 bp, Homo sapiens
cggcagttccgctaccaggaggcag

SEQ ID NO: 1776 - DNA, 25 bp, Homo sapiens
ggcagttccgctaccaggaggcagc

SEQ ID NO: 1777 - DNA, 25 bp, Homo sapiens
gcagttccgctaccaggaggcagct

SEQ ID NO: 1778 - DNA, 25 bp, Homo sapiens
cagttccgctaccaggaggcagctg

SEQ ID NO: 1779 - DNA, 25 bp, Homo sapiens
agttccgctaccaggaggcagctgg

SEQ ID NO: 1780 - DNA, 25 bp, Homo sapiens
gttccgctaccaggaggcagctgga

SEQ ID NO: 1781 - DNA, 25 bp, Homo sapiens
ttccgctaccaggaggcagctggac

SEQ ID NO: 1782 - DNA, 25 bp, Homo sapiens
tccgctaccaggaggcagctggacc

SEQ ID NO: 1783 - DNA, 25 bp, Homo sapiens
ccgctaccaggaggcagctggaccc

SEQ ID NO: 1784 - DNA, 25 bp, Homo sapiens
cgctaccaggaggcagctggacccc

SEQ ID NO: 1785 - DNA, 25 bp, Homo sapiens
gctaccaggaggcagctggacccca

SEQ ID NO: 1786 - DNA, 25 bp, Homo sapiens
ctaccaggaggcagctggaccccag

SEQ ID NO: 1787 - DNA, 25 bp, Homo sapiens
taccaggaggcagctggaccccagg

SEQ ID NO: 1788 - DNA, 25 bp, Homo sapiens
accaggaggcagctggaccccagga

SEQ ID NO: 1789 - DNA, 25 bp, Homo sapiens
ccaggaggcagctggaccccaggaa

SEQ ID NO: 1790 - DNA, 25 bp, Homo sapiens
caggaggcagctggaccccaggaag

SEQ ID NO: 1791 - DNA, 25 bp, Homo sapiens
aggaggcagctggaccccaggaagc

SEQ ID NO: 1792 - DNA, 25 bp, Homo sapiens
ggaggcagctggaccccaggaagct

SEQ ID NO: 1793 - DNA, 25 bp, Homo sapiens
gaggcagctggaccccaggaagctc

SEQ ID NO: 1794 - DNA, 25 bp, Homo sapiens
aggcagctggaccccaggaagctct

SEQ ID NO: 1795 - DNA, 25 bp, Homo sapiens
ggcagctggaccccaggaagctctt

SEQ ID NO: 1796 - DNA, 25 bp, Homo sapiens
gcagctggaccccaggaagctctta

SEQ ID NO: 1797 - DNA, 25 bp, Homo sapiens
cagctggaccccaggaagctcttag

SEQ ID NO: 1798 - DNA, 25 bp, Homo sapiens
agctggaccccaggaagctcttagg

SEQ ID NO: 1799 - DNA, 25 bp, Homo sapiens
gctggaccccaggaagctcttaggg

SEQ ID NO: 1800 - DNA, 25 bp, Homo sapiens
ctggaccccaggaagctcttagggg

SEQ ID NO: 1801 - DNA, 25 bp, Homo sapiens
tggaccccaggaagctcttaggggg

SEQ ID NO: 1802 - DNA, 25 bp, Homo sapiens
ggaccccaggaagctcttagggggc

SEQ ID NO: 1803 - DNA, 25 bp, Homo sapiens
gaccccaggaagctcttagggggct

SEQ ID NO: 1804 - DNA, 25 bp, Homo sapiens
accccaggaagctcttagggggctc

SEQ ID NO: 1805 - DNA, 25 bp, Homo sapiens
ccccaggaagctcttagggggctcc

SEQ ID NO: 1806 - DNA, 25 bp, Homo sapiens
cccaggaagctcttagggggctcca

SEQ ID NO: 1807 - DNA, 25 bp, Homo sapiens
ccaggaagctcttagggggctccag

SEQ ID NO: 1808 - DNA, 25 bp, Homo sapiens
caggaagctcttagggggctccagg

SEQ ID NO: 1809 - DNA, 25 bp, Homo sapiens
aggaagctcttagggggctccagga

SEQ ID NO: 1810 - DNA, 25 bp, Homo sapiens
ggaagctcttagggggctccaggag

SEQ ID NO: 1811 - DNA, 25 bp, Homo sapiens
gaagctcttagggggctccaggagc

SEQ ID NO: 1812 - DNA, 25 bp, Homo sapiens
aagctcttagggggctccaggagct

SEQ ID NO: 1813 - DNA, 25 bp, Homo sapiens
agctcttagggggctccaggagctc

SEQ ID NO: 1814 - DNA, 25 bp, Homo sapiens
gctcttagggggctccaggagctct

SEQ ID NO: 1815 - DNA, 25 bp, Homo sapiens
ctcttagggggctccaggagctctg

SEQ ID NO: 1816 - DNA, 25 bp, Homo sapiens
tcttagggggctccaggagctctgt

SEQ ID NO: 1817 - DNA, 25 bp, Homo sapiens
cttagggggctccaggagctctgtc

SEQ ID NO: 1818 - DNA, 25 bp, Homo sapiens
ttagggggctccaggagctctgtcg

SEQ ID NO: 1819 - DNA, 25 bp, Homo sapiens
tagggggctccaggagctctgtcgt

SEQ ID NO: 1820 - DNA, 25 bp, Homo sapiens
agggggctccaggagctctgtcgtc

SEQ ID NO: 1821 - DNA, 25 bp, Homo sapiens
gggggctccaggagctctgtcgtcg

SEQ ID NO: 1822 - DNA, 25 bp, Homo sapiens
ggggctccaggagctctgtcgtcgg

SEQ ID NO: 1823 - DNA, 25 bp, Homo sapiens
gggctccaggagctctgtcgtcggt

SEQ ID NO: 1824 - DNA, 25 bp, Homo sapiens
ggctccaggagctctgtcgtcggtg

SEQ ID NO: 1825 - DNA, 25 bp, Homo sapiens
gctccaggagctctgtcgtcggtgg

SEQ ID NO: 1826 - DNA, 25 bp, Homo sapiens
ctccaggagctctgtcgtcggtggc

SEQ ID NO: 1827 - DNA, 25 bp, Homo sapiens
tccaggagctctgtcgtcggtggct

SEQ ID NO: 1828 - DNA, 25 bp, Homo sapiens
ccaggagctctgtcgtcggtggctg

SEQ ID NO: 1829 - DNA, 25 bp, Homo sapiens
caggagctctgtcgtcggtggctga

SEQ ID NO: 1830 - DNA, 25 bp, Homo sapiens
aggagctctgtcgtcggtggctgag

SEQ ID NO: 1831 - DNA, 25 bp, Homo sapiens
ggagctctgtcgtcggtggctgagg

SEQ ID NO: 1832 - DNA, 25 bp, Homo sapiens
gagctctgtcgtcggtggctgaggc

SEQ ID NO: 1833 - DNA, 25 bp, Homo sapiens
agctctgtcgtcggtggctgaggcc

SEQ ID NO: 1834 - DNA, 25 bp, Homo sapiens
gctctgtcgtcggtggctgaggccc

SEQ ID NO: 1835 - DNA, 25 bp, Homo sapiens
ctctgtcgtcggtggctgaggcccg

SEQ ID NO: 1836 - DNA, 25 bp, Homo sapiens
tctgtcgtcggtggctgaggcccga

SEQ ID NO: 1837 - DNA, 25 bp, Homo sapiens
ctgtcgtcggtggctgaggcccgag

SEQ ID NO: 1838 - DNA, 25 bp, Homo sapiens
tgtcgtcggtggctgaggcccgagt

SEQ ID NO: 1839 - DNA, 25 bp, Homo sapiens
gtcgtcggtggctgaggcccgagtt

SEQ ID NO: 1840 - DNA, 25 bp, Homo sapiens
tcgtcggtggctgaggcccgagttg

SEQ ID NO: 1841 - DNA, 25 bp, Homo sapiens
cgtcggtggctgaggcccgagttgc

SEQ ID NO: 1842 - DNA, 25 bp, Homo sapiens
gtcggtggctgaggcccgagttgca

SEQ ID NO: 1843 - DNA, 25 bp, Homo sapiens
tcggtggctgaggcccgagttgcac

SEQ ID NO: 1844 - DNA, 25 bp, Homo sapiens
cggtggctgaggcccgagttgcaca

SEQ ID NO: 1845 - DNA, 25 bp, Homo sapiens
ggtggctgaggcccgagttgcacac

SEQ ID NO: 1846 - DNA, 25 bp, Homo sapiens
gtggctgaggcccgagttgcacacc

SEQ ID NO: 1847 - DNA, 25 bp, Homo sapiens
tggctgaggcccgagttgcacacca

SEQ ID NO: 1848 - DNA, 25 bp, Homo sapiens
ggctgaggcccgagttgcacaccaa

SEQ ID NO: 1849 - DNA, 25 bp, Homo sapiens
gctgaggcccgagttgcacaccaag

SEQ ID NO: 1850 - DNA, 25 bp, Homo sapiens
ctgaggcccgagttgcacaccaagg

SEQ ID NO: 1851 - DNA, 25 bp, Homo sapiens
tgaggcccgagttgcacaccaagga

SEQ ID NO: 1852 - DNA, 25 bp, Homo sapiens
gaggcccgagttgcacaccaaggag

SEQ ID NO: 1853 - DNA, 25 bp, Homo sapiens
aggcccgagttgcacaccaaggagc

SEQ ID NO: 1854 - DNA, 25 bp, Homo sapiens
ggcccgagttgcacaccaaggagca

SEQ ID NO: 1855 - DNA, 25 bp, Homo sapiens
gcccgagttgcacaccaaggagcag

SEQ ID NO: 1856 - DNA, 25 bp, Homo sapiens
cccgagttgcacaccaaggagcaga

SEQ ID NO: 1857 - DNA, 25 bp, Homo sapiens
ccgagttgcacaccaaggagcagat

SEQ ID NO: 1858 - DNA, 25 bp, Homo sapiens
cgagttgcacaccaaggagcagatc

SEQ ID NO: 1859 - DNA, 25 bp, Homo sapiens
gagttgcacaccaaggagcagatcc

SEQ ID NO: 1860 - DNA, 25 bp, Homo sapiens
agttgcacaccaaggagcagatcct

SEQ ID NO: 1861 - DNA, 25 bp, Homo sapiens
gttgcacaccaaggagcagatcctg

SEQ ID NO: 1862 - DNA, 25 bp, Homo sapiens
ttgcacaccaaggagcagatcctgg

SEQ ID NO: 1863 - DNA, 25 bp, Homo sapiens
tgcacaccaaggagcagatcctgga

SEQ ID NO: 1864 - DNA, 25 bp, Homo sapiens
gcacaccaaggagcagatcctggag

SEQ ID NO: 1865 - DNA, 25 bp, Homo sapiens
cacaccaaggagcagatcctggagc

SEQ ID NO: 1866 - DNA, 25 bp, Homo sapiens
acaccaaggagcagatcctggagct

SEQ ID NO: 1867 - DNA, 25 bp, Homo sapiens
caccaaggagcagatcctggagctg

SEQ ID NO: 1868 - DNA, 25 bp, Homo sapiens
accaaggagcagatcctggagctgc

SEQ ID NO: 1869 - DNA, 25 bp, Homo sapiens
ccaaggagcagatcctggagctgct

SEQ ID NO: 1870 - DNA, 25 bp, Homo sapiens
caaggagcagatcctggagctgctg

SEQ ID NO: 1871 - DNA, 25 bp, Homo sapiens
aaggagcagatcctggagctgctgg

SEQ ID NO: 1872 - DNA, 25 bp, Homo sapiens
aggagcagatcctggagctgctggt

SEQ ID NO: 1873 - DNA, 25 bp, Homo sapiens
ggagcagatcctggagctgctggtg

SEQ ID NO: 1874 - DNA, 25 bp, Homo sapiens
gagcagatcctggagctgctggtgc

SEQ ID NO: 1875 - DNA, 25 bp, Homo sapiens
agcagatcctggagctgctggtgct

SEQ ID NO: 1876 - DNA, 25 bp, Homo sapiens
gcagatcctggagctgctggtgctg

SEQ ID NO: 1877 - DNA, 25 bp, Homo sapiens
cagatcctggagctgctggtgctgg

SEQ ID NO: 1878 - DNA, 25 bp, Homo sapiens
agatcctggagctgctggtgctgga

SEQ ID NO: 1879 - DNA, 25 bp, Homo sapiens
gatcctggagctgctggtgctggag

SEQ ID NO: 1880 - DNA, 25 bp, Homo sapiens
atcctggagctgctggtgctggagc

SEQ ID NO: 1881 - DNA, 25 bp, Homo sapiens
tcctggagctgctggtgctggagca

SEQ ID NO: 1882 - DNA, 25 bp, Homo sapiens
cctggagctgctggtgctggagcag

SEQ ID NO: 1883 - DNA, 25 bp, Homo sapiens
ctggagctgctggtgctggagcagt

SEQ ID NO: 1884 - DNA, 25 bp, Homo sapiens
tggagctgctggtgctggagcagtt

SEQ ID NO: 1885 - DNA, 25 bp, Homo sapiens
ggagctgctggtgctggagcagttc

SEQ ID NO: 1886 - DNA, 25 bp, Homo sapiens
gagctgctggtgctggagcagttcc

SEQ ID NO: 1887 - DNA, 25 bp, Homo sapiens
agctgctggtgctggagcagttcct

SEQ ID NO: 1888 - DNA, 25 bp, Homo sapiens
gctgctggtgctggagcagttcctc

SEQ ID NO: 1889 - DNA, 25 bp, Homo sapiens
ctgctggtgctggagcagttcctca

SEQ ID NO: 1890 - DNA, 25 bp, Homo sapiens
tgctggtgctggagcagttcctcac

SEQ ID NO: 1891 - DNA, 25 bp, Homo sapiens
gctggtgctggagcagttcctcact

SEQ ID NO: 1892 - DNA, 25 bp, Homo sapiens
ctggtgctggagcagttcctcacta

SEQ ID NO: 1893 - DNA, 25 bp, Homo sapiens
tggtgctggagcagttcctcactat

SEQ ID NO: 1894 - DNA, 25 bp, Homo sapiens
ggtgctggagcagttcctcactatc

SEQ ID NO: 1895 - DNA, 25 bp, Homo sapiens
gtgctggagcagttcctcactatcc

SEQ ID NO: 1896 - DNA, 25 bp, Homo sapiens
tgctggagcagttcctcactatcct

SEQ ID NO: 1897 - DNA, 25 bp, Homo sapiens
gctggagcagttcctcactatcctg

SEQ ID NO: 1898 - DNA, 25 bp, Homo sapiens
ctggagcagttcctcactatcctgc

SEQ ID NO: 1899 - DNA, 25 bp, Homo sapiens
tggagcagttcctcactatcctgcc

SEQ ID NO: 1900 - DNA, 25 bp, Homo sapiens
ggagcagttcctcactatcctgccc

SEQ ID NO: 1901 - DNA, 25 bp, Homo sapiens
gagcagttcctcactatcctgcccc

SEQ ID NO: 1902 - DNA, 25 bp, Homo sapiens
agcagttcctcactatcctgccccg

SEQ ID NO: 1903 - DNA, 25 bp, Homo sapiens
gcagttcctcactatcctgccccgc

SEQ ID NO: 1904 - DNA, 25 bp, Homo sapiens
cagttcctcactatcctgccccgcg

SEQ ID NO: 1905 - DNA, 25 bp, Homo sapiens
agttcctcactatcctgccccgcga

SEQ ID NO: 1906 - DNA, 25 bp, Homo sapiens
gttcctcactatcctgccccgcgag

SEQ ID NO: 1907 - DNA, 25 bp, Homo sapiens
ttcctcactatcctgccccgcgagt

SEQ ID NO: 1908 - DNA, 25 bp, Homo sapiens
tcctcactatcctgccccgcgagtt

SEQ ID NO: 1909 - DNA, 25 bp, Homo sapiens
cctcactatcctgccccgcgagttc

SEQ ID NO: 1910 - DNA, 25 bp, Homo sapiens
ctcactatcctgccccgcgagttct

SEQ ID NO: 1911 - DNA, 25 bp, Homo sapiens
tcactatcctgccccgcgagttcta

SEQ ID NO: 1912 - DNA, 25 bp, Homo sapiens
cactatcctgccccgcgagttctac

SEQ ID NO: 1913 - DNA, 25 bp, Homo sapiens
actatcctgccccgcgagttctacg

SEQ ID NO: 1914 - DNA, 25 bp, Homo sapiens
ctatcctgccccgcgagttctacgc

SEQ ID NO: 1915 - DNA, 25 bp, Homo sapiens
tatcctgccccgcgagttctacgcc

SEQ ID NO: 1916 - DNA, 25 bp, Homo sapiens
atcctgccccgcgagttctacgcct

SEQ ID NO: 1917 - DNA, 25 bp, Homo sapiens
tcctgccccgcgagttctacgcctg

SEQ ID NO: 1918 - DNA, 25 bp, Homo sapiens
cctgccccgcgagttctacgcctgg

SEQ ID NO: 1919 - DNA, 25 bp, Homo sapiens
ctgccccgcgagttctacgcctgga

SEQ ID NO: 1920 - DNA, 25 bp, Homo sapiens
tgccccgcgagttctacgcctggat

SEQ ID NO: 1921 - DNA, 25 bp, Homo sapiens
gccccgcgagttctacgcctggatc

SEQ ID NO: 1922 - DNA, 25 bp, Homo sapiens
ccccgcgagttctacgcctggatcc

SEQ ID NO: 1923 - DNA, 25 bp, Homo sapiens
cccgcgagttctacgcctggatccg

SEQ ID NO: 1924 - DNA, 25 bp, Homo sapiens
ccgcgagttctacgcctggatccgg

SEQ ID NO: 1925 - DNA, 25 bp, Homo sapiens
cgcgagttctacgcctggatccggg

SEQ ID NO: 1926 - DNA, 25 bp, Homo sapiens
gcgagttctacgcctggatccggga

SEQ ID NO: 1927 - DNA, 25 bp, Homo sapiens
cgagttctacgcctggatccgggag

SEQ ID NO: 1928 - DNA, 25 bp, Homo sapiens
gagttctacgcctggatccgggagc

SEQ ID NO: 1929 - DNA, 25 bp, Homo sapiens
agttctacgcctggatccgggagca

SEQ ID NO: 1930 - DNA, 25 bp, Homo sapiens
gttctacgcctggatccgggagcat

SEQ ID NO: 1931 - DNA, 25 bp, Homo sapiens
ttctacgcctggatccgggagcatg

SEQ ID NO: 1932 - DNA, 25 bp, Homo sapiens
tctacgcctggatccgggagcatgg

SEQ ID NO: 1933 - DNA, 25 bp, Homo sapiens
ctacgcctggatccgggagcatggc

SEQ ID NO: 1934 - DNA, 25 bp, Homo sapiens
tacgcctggatccgggagcatggcc

SEQ ID NO: 1935 - DNA, 25 bp, Homo sapiens
acgcctggatccgggagcatggccc

SEQ ID NO: 1936 - DNA, 25 bp, Homo sapiens
cgcctggatccgggagcatggccca

SEQ ID NO: 1937 - DNA, 25 bp, Homo sapiens
gcctggatccgggagcatggcccag

SEQ ID NO: 1938 - DNA, 25 bp, Homo sapiens
cctggatccgggagcatggcccaga

SEQ ID NO: 1939 - DNA, 25 bp, Homo sapiens
ctggatccgggagcatggcccagag

SEQ ID NO: 1940 - DNA, 25 bp, Homo sapiens
tggatccgggagcatggcccagaga

SEQ ID NO: 1941 - DNA, 25 bp, Homo sapiens
ggatccgggagcatggcccagagag

SEQ ID NO: 1942 - DNA, 25 bp, Homo sapiens
gatccgggagcatggcccagagagt

SEQ ID NO: 1943 - DNA, 25 bp, Homo sapiens
atccgggagcatggcccagagagtg

SEQ ID NO: 1944 - DNA, 25 bp, Homo sapiens
tccgggagcatggcccagagagtgg

SEQ ID NO: 1945 - DNA, 25 bp, Homo sapiens
ccgggagcatggcccagagagtggc

SEQ ID NO: 1946 - DNA, 25 bp, Homo sapiens
cgggagcatggcccagagagtggca

SEQ ID NO: 1947 - DNA, 25 bp, Homo sapiens
gggagcatggcccagagagtggcaa

SEQ ID NO: 1948 - DNA, 25 bp, Homo sapiens
ggagcatggcccagagagtggcaag

SEQ ID NO: 1949 - DNA, 25 bp, Homo sapiens
gagcatggcccagagagtggcaagg

SEQ ID NO: 1950 - DNA, 25 bp, Homo sapiens
agcatggcccagagagtggcaaggc

SEQ ID NO: 1951 - DNA, 25 bp, Homo sapiens
gcatggcccagagagtggcaaggcc

SEQ ID NO: 1952 - DNA, 25 bp, Homo sapiens
catggcccagagagtggcaaggccc

SEQ ID NO: 1953 - DNA, 25 bp, Homo sapiens
atggcccagagagtggcaaggccct

SEQ ID NO: 1954 - DNA, 25 bp, Homo sapiens
tggcccagagagtggcaaggccctg

SEQ ID NO: 1955 - DNA, 25 bp, Homo sapiens
ggcccagagagtggcaaggccctgg

SEQ ID NO: 1956 - DNA, 25 bp, Homo sapiens
gcccagagagtggcaaggccctggc

SEQ ID NO: 1957 - DNA, 25 bp, Homo sapiens
cccagagagtggcaaggccctggcc

SEQ ID NO: 1958 - DNA, 25 bp, Homo sapiens
ccagagagtggcaaggccctggccg

SEQ ID NO: 1959 - DNA, 25 bp, Homo sapiens
cagagagtggcaaggccctggccgc

SEQ ID NO: 1960 - DNA, 25 bp, Homo sapiens
agagagtggcaaggccctggccgcc

SEQ ID NO: 1961 - DNA, 25 bp, Homo sapiens
gagagtggcaaggccctggccgcca

SEQ ID NO: 1962 - DNA, 25 bp, Homo sapiens
agagtggcaaggccctggccgccat

SEQ ID NO: 1963 - DNA, 25 bp, Homo sapiens
gagtggcaaggccctggccgccatg

SEQ ID NO: 1964 - DNA, 25 bp, Homo sapiens
agtggcaaggccctggccgccatgg

SEQ ID NO: 1965 - DNA, 25 bp, Homo sapiens
gtggcaaggccctggccgccatggt

SEQ ID NO: 1966 - DNA, 25 bp, Homo sapiens
tggcaaggccctggccgccatggtg

SEQ ID NO: 1967 - DNA, 25 bp, Homo sapiens
ggcaaggccctggccgccatggtgg

SEQ ID NO: 1968 - DNA, 25 bp, Homo sapiens
gcaaggccctggccgccatggtgga

SEQ ID NO: 1969 - DNA, 25 bp, Homo sapiens
caaggccctggccgccatggtggag

SEQ ID NO: 1970 - DNA, 25 bp, Homo sapiens
aaggccctggccgccatggtggagg

SEQ ID NO: 1971 - DNA, 25 bp, Homo sapiens
aggccctggccgccatggtggagga

SEQ ID NO: 1972 - DNA, 25 bp, Homo sapiens
ggccctggccgccatggtggaggac

SEQ ID NO: 1973 - DNA, 25 bp, Homo sapiens
gccctggccgccatggtggaggacc

SEQ ID NO: 1974 - DNA, 25 bp, Homo sapiens
ccctggccgccatggtggaggacct

SEQ ID NO: 1975 - DNA, 25 bp, Homo sapiens
cctggccgccatggtggaggacctg

SEQ ID NO: 1976 - DNA, 25 bp, Homo sapiens
ctggccgccatggtggaggacctga

SEQ ID NO: 1977 - DNA, 25 bp, Homo sapiens
tggccgccatggtggaggacctgac

SEQ ID NO: 1978 - DNA, 25 bp, Homo sapiens
ggccgccatggtggaggacctgaca

SEQ ID NO: 1979 - DNA, 25 bp, Homo sapiens
gccgccatggtggaggacctgacag

SEQ ID NO: 1980 - DNA, 25 bp, Homo sapiens
ccgccatggtggaggacctgacaga

SEQ ID NO: 1981 - DNA, 25 bp, Homo sapiens
cgccatggtggaggacctgacagaa

SEQ ID NO: 1982 - DNA, 25 bp, Homo sapiens
gccatggtggaggacctgacagaaa

SEQ ID NO: 1983 - DNA, 25 bp, Homo sapiens
ccatggtggaggacctgacagaaag

SEQ ID NO: 1984 - DNA, 25 bp, Homo sapiens
catggtggaggacctgacagaaaga

SEQ ID NO: 1985 - DNA, 25 bp, Homo sapiens
atggtggaggacctgacagaaagag

SEQ ID NO: 1986 - DNA, 25 bp, Homo sapiens
tggtggaggacctgacagaaagagc

SEQ ID NO: 1987 - DNA, 25 bp, Homo sapiens
ggtggaggacctgacagaaagagca

SEQ ID NO: 1988 - DNA, 25 bp, Homo sapiens
gtggaggacctgacagaaagagcac

SEQ ID NO: 1989 - DNA, 25 bp, Homo sapiens
tggaggacctgacagaaagagcact

SEQ ID NO: 1990 - DNA, 25 bp, Homo sapiens
ggaggacctgacagaaagagcactg

SEQ ID NO: 1991 - DNA, 25 bp, Homo sapiens
gaggacctgacagaaagagcactgg

SEQ ID NO: 1992 - DNA, 25 bp, Homo sapiens
aggacctgacagaaagagcactgga

SEQ ID NO: 1993 - DNA, 25 bp, Homo sapiens
ggacctgacagaaagagcactggag

SEQ ID NO: 1994 - DNA, 25 bp, Homo sapiens
gacctgacagaaagagcactggagg

SEQ ID NO: 1995 - DNA, 25 bp, Homo sapiens
acctgacagaaagagcactggaggc

SEQ ID NO: 1996 - DNA, 25 bp, Homo sapiens
cctgacagaaagagcactggaggcc

SEQ ID NO: 1997 - DNA, 25 bp, Homo sapiens
ctgacagaaagagcactggaggcca

SEQ ID NO: 1998 - DNA, 25 bp, Homo sapiens
tgacagaaagagcactggaggccaa

SEQ ID NO: 1999 - DNA, 25 bp, Homo sapiens
gacagaaagagcactggaggccaag

SEQ ID NO: 2000 - DNA, 25 bp, Homo sapiens
acagaaagagcactggaggccaagg

SEQ ID NO: 2001 - DNA, 25 bp, Homo sapiens
cagaaagagcactggaggccaaggc

SEQ ID NO: 2002 - DNA, 25 bp, Homo sapiens
agaaagagcactggaggccaaggcg

SEQ ID NO: 2003 - DNA, 25 bp, Homo sapiens
gaaagagcactggaggccaaggcgg

SEQ ID NO: 2004 - DNA, 25 bp, Homo sapiens
aaagagcactggaggccaaggcggt

SEQ ID NO: 2005 - DNA, 25 bp, Homo sapiens
aagagcactggaggccaaggcggtt

SEQ ID NO: 2006 - DNA, 25 bp, Homo sapiens
agagcactggaggccaaggcggttc

SEQ ID NO: 2007 - DNA, 25 bp, Homo sapiens
gagcactggaggccaaggcggttcc

SEQ ID NO: 2008 - DNA, 25 bp, Homo sapiens
agcactggaggccaaggcggttcca

SEQ ID NO: 2009 - DNA, 25 bp, Homo sapiens
gcactggaggccaaggcggttccat

SEQ ID NO: 2010 - DNA, 25 bp, Homo sapiens
cactggaggccaaggcggttccatg

SEQ ID NO: 2011 - DNA, 25 bp, Homo sapiens
actggaggccaaggcggttccatgc

SEQ ID NO: 2012 - DNA, 25 bp, Homo sapiens
ctggaggccaaggcggttccatgcc

SEQ ID NO: 2013 - DNA, 25 bp, Homo sapiens
tggaggccaaggcggttccatgcca

SEQ ID NO: 2014 - DNA, 25 bp, Homo sapiens
ggaggccaaggcggttccatgccac

SEQ ID NO: 2015 - DNA, 25 bp, Homo sapiens
gaggccaaggcggttccatgccaca

SEQ ID NO: 2016 - DNA, 25 bp, Homo sapiens
aggccaaggcggttccatgccacag

SEQ ID NO: 2017 - DNA, 25 bp, Homo sapiens
ggccaaggcggttccatgccacagg

SEQ ID NO: 2018 - DNA, 25 bp, Homo sapiens
gccaaggcggttccatgccacaggc

SEQ ID NO: 2019 - DNA, 25 bp, Homo sapiens
ccaaggcggttccatgccacaggca

SEQ ID NO: 2020 - DNA, 25 bp, Homo sapiens
caaggcggttccatgccacaggcag

SEQ ID NO: 2021 - DNA, 25 bp, Homo sapiens
aaggcggttccatgccacaggcagg

SEQ ID NO: 2022 - DNA, 25 bp, Homo sapiens
aggcggttccatgccacaggcaggg

SEQ ID NO: 2023 - DNA, 25 bp, Homo sapiens
ggcggttccatgccacaggcaggga

SEQ ID NO: 2024 - DNA, 25 bp, Homo sapiens
gcggttccatgccacaggcagggag

SEQ ID NO: 2025 - DNA, 25 bp, Homo sapiens
cggttccatgccacaggcagggaga

SEQ ID NO: 2026 - DNA, 25 bp, Homo sapiens
ggttccatgccacaggcagggagag

SEQ ID NO: 2027 - DNA, 25 bp, Homo sapiens
gttccatgccacaggcagggagagc

SEQ ID NO: 2028 - DNA, 25 bp, Homo sapiens
ttccatgccacaggcagggagagca

SEQ ID NO: 2029 - DNA, 25 bp, Homo sapiens
tccatgccacaggcagggagagcag

SEQ ID NO: 2030 - DNA, 25 bp, Homo sapiens
ccatgccacaggcagggagagcagg

SEQ ID NO: 2031 - DNA, 25 bp, Homo sapiens
catgccacaggcagggagagcagga

SEQ ID NO: 2032 - DNA, 25 bp, Homo sapiens
atgccacaggcagggagagcaggag

SEQ ID NO: 2033 - DNA, 25 bp, Homo sapiens
tgccacaggcagggagagcaggagg

SEQ ID NO: 2034 - DNA, 25 bp, Homo sapiens
gccacaggcagggagagcaggagga

SEQ ID NO: 2035 - DNA, 25 bp, Homo sapiens
ccacaggcagggagagcaggaggaa

SEQ ID NO: 2036 - DNA, 25 bp, Homo sapiens
cacaggcagggagagcaggaggaaa

SEQ ID NO: 2037 - DNA, 25 bp, Homo sapiens
acaggcagggagagcaggaggaaac

SEQ ID NO: 2038 - DNA, 25 bp, Homo sapiens
caggcagggagagcaggaggaaaca

SEQ ID NO: 2039 - DNA, 25 bp, Homo sapiens
aggcagggagagcaggaggaaacag

SEQ ID NO: 2040 - DNA, 25 bp, Homo sapiens
ggcagggagagcaggaggaaacagc

SEQ ID NO: 2041 - DNA, 25 bp, Homo sapiens
gcagggagagcaggaggaaacagca

SEQ ID NO: 2042 - DNA, 25 bp, Homo sapiens
cagggagagcaggaggaaacagcac

SEQ ID NO: 2043 - DNA, 25 bp, Homo sapiens
agggagagcaggaggaaacagcact

SEQ ID NO: 2044 - DNA, 25 bp, Homo sapiens
gggagagcaggaggaaacagcactt

SEQ ID NO: 2045 - DNA, 25 bp, Homo sapiens
ggagagcaggaggaaacagcacttt

SEQ ID NO: 2046 - DNA, 25 bp, Homo sapiens
gagagcaggaggaaacagcactttg

SEQ ID NO: 2047 - DNA, 25 bp, Homo sapiens
agagcaggaggaaacagcactttgc

SEQ ID NO: 2048 - DNA, 25 bp, Homo sapiens
gagcaggaggaaacagcactttgca

SEQ ID NO: 2049 - DNA, 25 bp, Homo sapiens
agcaggaggaaacagcactttgcag

SEQ ID NO: 2050 - DNA, 25 bp, Homo sapiens
gcaggaggaaacagcactttgcaga

SEQ ID NO: 2051 - DNA, 25 bp, Homo sapiens
caggaggaaacagcactttgcagag

SEQ ID NO: 2052 - DNA, 25 bp, Homo sapiens
aggaggaaacagcactttgcagagg

SEQ ID NO: 2053 - DNA, 25 bp, Homo sapiens
ggaggaaacagcactttgcagaggc

SEQ ID NO: 2054 - DNA, 25 bp, Homo sapiens
gaggaaacagcactttgcagaggcg

SEQ ID NO: 2055 - DNA, 25 bp, Homo sapiens
aggaaacagcactttgcagaggcgc

SEQ ID NO: 2056 - DNA, 25 bp, Homo sapiens
ggaaacagcactttgcagaggcgct

SEQ ID NO: 2057 - DNA, 25 bp, Homo sapiens
gaaacagcactttgcagaggcgctt

SEQ ID NO: 2058 - DNA, 25 bp, Homo sapiens
aaacagcactttgcagaggcgcttg

SEQ ID NO: 2059 - DNA, 25 bp, Homo sapiens
aacagcactttgcagaggcgcttgg

SEQ ID NO: 2060 - DNA, 25 bp, Homo sapiens
acagcactttgcagaggcgcttggg

SEQ ID NO: 2061 - DNA, 25 bp, Homo sapiens
cagcactttgcagaggcgcttggga

SEQ ID NO: 2062 - DNA, 25 bp, Homo sapiens
agcactttgcagaggcgcttgggag

SEQ ID NO: 2063 - DNA, 25 bp, Homo sapiens
gcactttgcagaggcgcttgggagc

SEQ ID NO: 2064 - DNA, 25 bp, Homo sapiens
cactttgcagaggcgcttgggagcc

SEQ ID NO: 2065 - DNA, 25 bp, Homo sapiens
actttgcagaggcgcttgggagcca

SEQ ID NO: 2066 - DNA, 25 bp, Homo sapiens
ctttgcagaggcgcttgggagccag

SEQ ID NO: 2067 - DNA, 25 bp, Homo sapiens
tttgcagaggcgcttgggagccagg

SEQ ID NO: 2068 - DNA, 25 bp, Homo sapiens
ttgcagaggcgcttgggagccaggc

SEQ ID NO: 2069 - DNA, 25 bp, Homo sapiens
tgcagaggcgcttgggagccaggca

SEQ ID NO: 2070 - DNA, 25 bp, Homo sapiens
gcagaggcgcttgggagccaggcat

SEQ ID NO: 2071 - DNA, 25 bp, Homo sapiens
cagaggcgcttgggagccaggcatc

SEQ ID NO: 2072 - DNA, 25 bp, Homo sapiens
agaggcgcttgggagccaggcatcc

SEQ ID NO: 2073 - DNA, 25 bp, Homo sapiens
gaggcgcttgggagccaggcatcca

SEQ ID NO: 2074 - DNA, 25 bp, Homo sapiens
aggcgcttgggagccaggcatccag

SEQ ID NO: 2075 - DNA, 25 bp, Homo sapiens
ggcgcttgggagccaggcatccagc

SEQ ID NO: 2076 - DNA, 25 bp, Homo sapiens
gcgcttgggagccaggcatccagct

SEQ ID NO: 2077 - DNA, 25 bp, Homo sapiens
cgcttgggagccaggcatccagctg

SEQ ID NO: 2078 - DNA, 25 bp, Homo sapiens
gcttgggagccaggcatccagctgg

SEQ ID NO: 2079 - DNA, 25 bp, Homo sapiens
cttgggagccaggcatccagctggg

SEQ ID NO: 2080 - DNA, 25 bp, Homo sapiens
ttgggagccaggcatccagctgggg

SEQ ID NO: 2081 - DNA, 25 bp, Homo sapiens
tgggagccaggcatccagctggggc

SEQ ID NO: 2082 - DNA, 25 bp, Homo sapiens
gggagccaggcatccagctggggcc

SEQ ID NO: 2083 - DNA, 25 bp, Homo sapiens
ggagccaggcatccagctggggcca

SEQ ID NO: 2084 - DNA, 25 bp, Homo sapiens
gagccaggcatccagctggggccag

SEQ ID NO: 2085 - DNA, 25 bp, Homo sapiens
agccaggcatccagctggggccagt

SEQ ID NO: 2086 - DNA, 25 bp, Homo sapiens
gccaggcatccagctggggccagtg

SEQ ID NO: 2087 - DNA, 25 bp, Homo sapiens
ccaggcatccagctggggccagtgg

SEQ ID NO: 2088 - DNA, 25 bp, Homo sapiens
caggcatccagctggggccagtgga

SEQ ID NO: 2089 - DNA, 25 bp, Homo sapiens
aggcatccagctggggccagtggag

SEQ ID NO: 2090 - DNA, 25 bp, Homo sapiens
ggcatccagctggggccagtggagg

SEQ ID NO: 2091 - DNA, 25 bp, Homo sapiens
gcatccagctggggccagtggaggt

SEQ ID NO: 2092 - DNA, 25 bp, Homo sapiens
catccagctggggccagtggaggtt

SEQ ID NO: 2093 - DNA, 25 bp, Homo sapiens
atccagctggggccagtggaggtta

SEQ ID NO: 2094 - DNA, 25 bp, Homo sapiens
tccagctggggccagtggaggttaa

SEQ ID NO: 2095 - DNA, 25 bp, Homo sapiens
ccagctggggccagtggaggttaag

SEQ ID NO: 2096 - DNA, 25 bp, Homo sapiens
cagctggggccagtggaggttaagc

SEQ ID NO: 2097 - DNA, 25 bp, Homo sapiens
agctggggccagtggaggttaagcc

SEQ ID NO: 2098 - DNA, 25 bp, Homo sapiens
gctggggccagtggaggttaagcct

SEQ ID NO: 2099 - DNA, 25 bp, Homo sapiens
ctggggccagtggaggttaagcctg

SEQ ID NO: 2100 - DNA, 25 bp, Homo sapiens
tggggccagtggaggttaagcctga

SEQ ID NO: 2101 - DNA, 25 bp, Homo sapiens
ggggccagtggaggttaagcctgaa

SEQ ID NO: 2102 - DNA, 25 bp, Homo sapiens
gggccagtggaggttaagcctgaat

SEQ ID NO: 2103 - DNA, 25 bp, Homo sapiens
ggccagtggaggttaagcctgaatg

SEQ ID NO: 2104 - DNA, 25 bp, Homo sapiens
gccagtggaggttaagcctgaatgg

SEQ ID NO: 2105 - DNA, 25 bp, Homo sapiens
ccagtggaggttaagcctgaatggg

SEQ ID NO: 2106 - DNA, 25 bp, Homo sapiens
cagtggaggttaagcctgaatgggg

SEQ ID NO: 2107 - DNA, 25 bp, Homo sapiens
agtggaggttaagcctgaatggggg

SEQ ID NO: 2108 - DNA, 25 bp, Homo sapiens
gtggaggttaagcctgaatggggga

SEQ ID NO: 2109 - DNA, 25 bp, Homo sapiens
tggaggttaagcctgaatgggggat

SEQ ID NO: 2110 - DNA, 25 bp, Homo sapiens
ggaggttaagcctgaatgggggatg

SEQ ID NO: 2111 - DNA, 25 bp, Homo sapiens
gaggttaagcctgaatgggggatgc

SEQ ID NO: 2112 - DNA, 25 bp, Homo sapiens
aggttaagcctgaatgggggatgcc

SEQ ID NO: 2113 - DNA, 25 bp, Homo sapiens
ggttaagcctgaatgggggatgccc

SEQ ID NO: 2114 - DNA, 25 bp, Homo sapiens
gttaagcctgaatgggggatgcccc

SEQ ID NO: 2115 - DNA, 25 bp, Homo sapiens
ttaagcctgaatgggggatgccccc

SEQ ID NO: 2116 - DNA, 25 bp, Homo sapiens
taagcctgaatgggggatgccccct

SEQ ID NO: 2117 - DNA, 25 bp, Homo sapiens
aagcctgaatgggggatgccccctg

SEQ ID NO: 2118 - DNA, 25 bp, Homo sapiens
agcctgaatgggggatgccccctgg

SEQ ID NO: 2119 - DNA, 25 bp, Homo sapiens
gcctgaatgggggatgccccctggg

SEQ ID NO: 2120 - DNA, 25 bp, Homo sapiens
cctgaatgggggatgccccctgggg

SEQ ID NO: 2121 - DNA, 25 bp, Homo sapiens
ctgaatgggggatgccccctgggga

SEQ ID NO: 2122 - DNA, 25 bp, Homo sapiens
tgaatgggggatgccccctggggaa

SEQ ID NO: 2123 - DNA, 25 bp, Homo sapiens
gaatgggggatgccccctggggaag

SEQ ID NO: 2124 - DNA, 25 bp, Homo sapiens
aatgggggatgccccctggggaagg

SEQ ID NO: 2125 - DNA, 25 bp, Homo sapiens
atgggggatgccccctggggaagga

SEQ ID NO: 2126 - DNA, 25 bp, Homo sapiens
tgggggatgccccctggggaaggag

SEQ ID NO: 2127 - DNA, 25 bp, Homo sapiens
gggggatgccccctggggaaggagt

SEQ ID NO: 2128 - DNA, 25 bp, Homo sapiens
ggggatgccccctggggaaggagtt

SEQ ID NO: 2129 - DNA, 25 bp, Homo sapiens
gggatgccccctggggaaggagttc

SEQ ID NO: 2130 - DNA, 25 bp, Homo sapiens
ggatgccccctggggaaggagttca

SEQ ID NO: 2131 - DNA, 25 bp, Homo sapiens
gatgccccctggggaaggagttcaa

SEQ ID NO: 2132 - DNA, 25 bp, Homo sapiens
atgccccctggggaaggagttcaag

SEQ ID NO: 2133 - DNA, 25 bp, Homo sapiens
tgccccctggggaaggagttcaagg

SEQ ID NO: 2134 - DNA, 25 bp, Homo sapiens
gccccctggggaaggagttcaaggt

SEQ ID NO: 2135 - DNA, 25 bp, Homo sapiens
ccccctggggaaggagttcaaggtc

SEQ ID NO: 2136 - DNA, 25 bp, Homo sapiens
cccctggggaaggagttcaaggtcc

SEQ ID NO: 2137 - DNA, 25 bp, Homo sapiens
ccctggggaaggagttcaaggtcca

SEQ ID NO: 2138 - DNA, 25 bp, Homo sapiens
cctggggaaggagttcaaggtccag

SEQ ID NO: 2139 - DNA, 25 bp, Homo sapiens
ctggggaaggagttcaaggtccaga

SEQ ID NO: 2140 - DNA, 25 bp, Homo sapiens
tggggaaggagttcaaggtccagac

SEQ ID NO: 2141 - DNA, 25 bp, Homo sapiens
ggggaaggagttcaaggtccagacc

SEQ ID NO: 2142 - DNA, 25 bp, Homo sapiens
gggaaggagttcaaggtccagaccc

SEQ ID NO: 2143 - DNA, 25 bp, Homo sapiens
ggaaggagttcaaggtccagaccca

SEQ ID NO: 2144 - DNA, 25 bp, Homo sapiens
gaaggagttcaaggtccagacccag

SEQ ID NO: 2145 - DNA, 25 bp, Homo sapiens
aaggagttcaaggtccagacccagg

SEQ ID NO: 2146 - DNA, 25 bp, Homo sapiens
aggagttcaaggtccagacccaggt

SEQ ID NO: 2147 - DNA, 25 bp, Homo sapiens
ggagttcaaggtccagacccaggta

SEQ ID NO: 2148 - DNA, 25 bp, Homo sapiens
gagttcaaggtccagacccaggtac

SEQ ID NO: 2149 - DNA, 25 bp, Homo sapiens
agttcaaggtccagacccaggtacc

SEQ ID NO: 2150 - DNA, 25 bp, Homo sapiens
gttcaaggtccagacccaggtaccg

SEQ ID NO: 2151 - DNA, 25 bp, Homo sapiens
ttcaaggtccagacccaggtaccga

SEQ ID NO: 2152 - DNA, 25 bp, Homo sapiens
tcaaggtccagacccaggtaccgag

SEQ ID NO: 2153 - DNA, 25 bp, Homo sapiens
caaggtccagacccaggtaccgagg

SEQ ID NO: 2154 - DNA, 25 bp, Homo sapiens
aaggtccagacccaggtaccgagga

SEQ ID NO: 2155 - DNA, 25 bp, Homo sapiens
aggtccagacccaggtaccgaggag

SEQ ID NO: 2156 - DNA, 25 bp, Homo sapiens
ggtccagacccaggtaccgaggagc

SEQ ID NO: 2157 - DNA, 25 bp, Homo sapiens
gtccagacccaggtaccgaggagca

SEQ ID NO: 2158 - DNA, 25 bp, Homo sapiens
tccagacccaggtaccgaggagcag

SEQ ID NO: 2159 - DNA, 25 bp, Homo sapiens
ccagacccaggtaccgaggagcagc

SEQ ID NO: 2160 - DNA, 25 bp, Homo sapiens
cagacccaggtaccgaggagcagct

SEQ ID NO: 2161 - DNA, 25 bp, Homo sapiens
agacccaggtaccgaggagcagctc

SEQ ID NO: 2162 - DNA, 25 bp, Homo sapiens
gacccaggtaccgaggagcagctca

SEQ ID NO: 2163 - DNA, 25 bp, Homo sapiens
acccaggtaccgaggagcagctcag

SEQ ID NO: 2164 - DNA, 25 bp, Homo sapiens
cccaggtaccgaggagcagctcagt

SEQ ID NO: 2165 - DNA, 25 bp, Homo sapiens
ccaggtaccgaggagcagctcagtc

SEQ ID NO: 2166 - DNA, 25 bp, Homo sapiens
caggtaccgaggagcagctcagtca

SEQ ID NO: 2167 - DNA, 25 bp, Homo sapiens
aggtaccgaggagcagctcagtcag

SEQ ID NO: 2168 - DNA, 25 bp, Homo sapiens
ggtaccgaggagcagctcagtcagg

SEQ ID NO: 2169 - DNA, 25 bp, Homo sapiens
gtaccgaggagcagctcagtcagga

SEQ ID NO: 2170 - DNA, 25 bp, Homo sapiens
taccgaggagcagctcagtcaggac

SEQ ID NO: 2171 - DNA, 25 bp, Homo sapiens
accgaggagcagctcagtcaggacc

SEQ ID NO: 2172 - DNA, 25 bp, Homo sapiens
ccgaggagcagctcagtcaggaccc

SEQ ID NO: 2173 - DNA, 25 bp, Homo sapiens
cgaggagcagctcagtcaggaccct

SEQ ID NO: 2174 - DNA, 25 bp, Homo sapiens
gaggagcagctcagtcaggaccctg

SEQ ID NO: 2175 - DNA, 25 bp, Homo sapiens
aggagcagctcagtcaggaccctgg

SEQ ID NO: 2176 - DNA, 25 bp, Homo sapiens
ggagcagctcagtcaggaccctgga

SEQ ID NO: 2177 - DNA, 25 bp, Homo sapiens
gagcagctcagtcaggaccctggag

SEQ ID NO: 2178 - DNA, 25 bp, Homo sapiens
agcagctcagtcaggaccctggaga

SEQ ID NO: 2179 - DNA, 25 bp, Homo sapiens
gcagctcagtcaggaccctggagat

SEQ ID NO: 2180 - DNA, 25 bp, Homo sapiens
cagctcagtcaggaccctggagatg

SEQ ID NO: 2181 - DNA, 25 bp, Homo sapiens
agctcagtcaggaccctggagatga

SEQ ID NO: 2182 - DNA, 25 bp, Homo sapiens
gctcagtcaggaccctggagatgag

SEQ ID NO: 2183 - DNA, 25 bp, Homo sapiens
ctcagtcaggaccctggagatgaga

SEQ ID NO: 2184 - DNA, 25 bp, Homo sapiens
tcagtcaggaccctggagatgagac

SEQ ID NO: 2185 - DNA, 25 bp, Homo sapiens
cagtcaggaccctggagatgagaca

SEQ ID NO: 2186 - DNA, 25 bp, Homo sapiens
agtcaggaccctggagatgagacac

SEQ ID NO: 2187 - DNA, 25 bp, Homo sapiens
gtcaggaccctggagatgagacacg

SEQ ID NO: 2188 - DNA, 25 bp, Homo sapiens
tcaggaccctggagatgagacacgg

SEQ ID NO: 2189 - DNA, 25 bp, Homo sapiens
caggaccctggagatgagacacggg

SEQ ID NO: 2190 - DNA, 25 bp, Homo sapiens
aggaccctggagatgagacacgggc

SEQ ID NO: 2191 - DNA, 25 bp, Homo sapiens
ggaccctggagatgagacacgggcc

SEQ ID NO: 2192 - DNA, 25 bp, Homo sapiens
gaccctggagatgagacacgggcct

SEQ ID NO: 2193 - DNA, 25 bp, Homo sapiens
accctggagatgagacacgggcctt

SEQ ID NO: 2194 - DNA, 25 bp, Homo sapiens
ccctggagatgagacacgggccttc

SEQ ID NO: 2195 - DNA, 25 bp, Homo sapiens
cctggagatgagacacgggccttcc

SEQ ID NO: 2196 - DNA, 25 bp, Homo sapiens
ctggagatgagacacgggccttcca

SEQ ID NO: 2197 - DNA, 25 bp, Homo sapiens
tggagatgagacacgggccttccag

SEQ ID NO: 2198 - DNA, 25 bp, Homo sapiens
ggagatgagacacgggccttccagg

SEQ ID NO: 2199 - DNA, 25 bp, Homo sapiens
gagatgagacacgggccttccagga

SEQ ID NO: 2200 - DNA, 25 bp, Homo sapiens
agatgagacacgggccttccaggag

SEQ ID NO: 2201 - DNA, 25 bp, Homo sapiens
gatgagacacgggccttccaggagc

SEQ ID NO: 2202 - DNA, 25 bp, Homo sapiens
atgagacacgggccttccaggagca

SEQ ID NO: 2203 - DNA, 25 bp, Homo sapiens
tgagacacgggccttccaggagcaa

SEQ ID NO: 2204 - DNA, 25 bp, Homo sapiens
gagacacgggccttccaggagcaag

SEQ ID NO: 2205 - DNA, 25 bp, Homo sapiens
agacacgggccttccaggagcaagc

SEQ ID NO: 2206 - DNA, 25 bp, Homo sapiens
gacacgggccttccaggagcaagca

SEQ ID NO: 2207 - DNA, 25 bp, Homo sapiens
acacgggccttccaggagcaagcac

SEQ ID NO: 2208 - DNA, 25 bp, Homo sapiens
cacgggccttccaggagcaagcact

SEQ ID NO: 2209 - DNA, 25 bp, Homo sapiens
acgggccttccaggagcaagcacta

SEQ ID NO: 2210 - DNA, 25 bp, Homo sapiens
cgggccttccaggagcaagcactac

SEQ ID NO: 2211 - DNA, 25 bp, Homo sapiens
gggccttccaggagcaagcactacc

SEQ ID NO: 2212 - DNA, 25 bp, Homo sapiens
ggccttccaggagcaagcactacct

SEQ ID NO: 2213 - DNA, 25 bp, Homo sapiens
gccttccaggagcaagcactacctg

SEQ ID NO: 2214 - DNA, 25 bp, Homo sapiens
ccttccaggagcaagcactacctgt

SEQ ID NO: 2215 - DNA, 25 bp, Homo sapiens
cttccaggagcaagcactacctgtt

SEQ ID NO: 2216 - DNA, 25 bp, Homo sapiens
ttccaggagcaagcactacctgttc

SEQ ID NO: 2217 - DNA, 25 bp, Homo sapiens
tccaggagcaagcactacctgttct

SEQ ID NO: 2218 - DNA, 25 bp, Homo sapiens
ccaggagcaagcactacctgttctg

SEQ ID NO: 2219 - DNA, 25 bp, Homo sapiens
caggagcaagcactacctgttctgc

SEQ ID NO: 2220 - DNA, 25 bp, Homo sapiens
aggagcaagcactacctgttctgca

SEQ ID NO: 2221 - DNA, 25 bp, Homo sapiens
ggagcaagcactacctgttctgcag

SEQ ID NO: 2222 - DNA, 25 bp, Homo sapiens
gagcaagcactacctgttctgcagg

SEQ ID NO: 2223 - DNA, 25 bp, Homo sapiens
agcaagcactacctgttctgcaggc

SEQ ID NO: 2224 - DNA, 25 bp, Homo sapiens
gcaagcactacctgttctgcaggcg

SEQ ID NO: 2225 - DNA, 25 bp, Homo sapiens
caagcactacctgttctgcaggcgg

SEQ ID NO: 2226 - DNA, 25 bp, Homo sapiens
aagcactacctgttctgcaggcggg

SEQ ID NO: 2227 - DNA, 25 bp, Homo sapiens
agcactacctgttctgcaggcgggt

SEQ ID NO: 2228 - DNA, 25 bp, Homo sapiens
gcactacctgttctgcaggcgggtc

SEQ ID NO: 2229 - DNA, 25 bp, Homo sapiens
cactacctgttctgcaggcgggtcc

SEQ ID NO: 2230 - DNA, 25 bp, Homo sapiens
actacctgttctgcaggcgggtcct

SEQ ID NO: 2231 - DNA, 25 bp, Homo sapiens
ctacctgttctgcaggcgggtcctg

SEQ ID NO: 2232 - DNA, 25 bp, Homo sapiens
tacctgttctgcaggcgggtcctgg

SEQ ID NO: 2233 - DNA, 25 bp, Homo sapiens
acctgttctgcaggcgggtcctggc

SEQ ID NO: 2234 - DNA, 25 bp, Homo sapiens
cctgttctgcaggcgggtcctggcc

SEQ ID NO: 2235 - DNA, 25 bp, Homo sapiens
ctgttctgcaggcgggtcctggcct

SEQ ID NO: 2236 - DNA, 25 bp, Homo sapiens
tgttctgcaggcgggtcctggcctc

SEQ ID NO: 2237 - DNA, 25 bp, Homo sapiens
gttctgcaggcgggtcctggcctcc

SEQ ID NO: 2238 - DNA, 25 bp, Homo sapiens
ttctgcaggcgggtcctggcctccc

SEQ ID NO: 2239 - DNA, 25 bp, Homo sapiens
tctgcaggcgggtcctggcctcccc

SEQ ID NO: 2240 - DNA, 25 bp, Homo sapiens
ctgcaggcgggtcctggcctccccg

SEQ ID NO: 2241 - DNA, 25 bp, Homo sapiens
tgcaggcgggtcctggcctccccgc

SEQ ID NO: 2242 - DNA, 25 bp, Homo sapiens
gcaggcgggtcctggcctccccgca

SEQ ID NO: 2243 - DNA, 25 bp, Homo sapiens
caggcgggtcctggcctccccgcag

SEQ ID NO: 2244 - DNA, 25 bp, Homo sapiens
aggcgggtcctggcctccccgcagt

SEQ ID NO: 2245 - DNA, 25 bp, Homo sapiens
ggcgggtcctggcctccccgcagtg

SEQ ID NO: 2246 - DNA, 25 bp, Homo sapiens
gcgggtcctggcctccccgcagtga

SEQ ID NO: 2247 - DNA, 25 bp, Homo sapiens
cgggtcctggcctccccgcagtgaa

SEQ ID NO: 2248 - DNA, 25 bp, Homo sapiens
gggtcctggcctccccgcagtgaat

SEQ ID NO: 2249 - DNA, 25 bp, Homo sapiens
ggtcctggcctccccgcagtgaatc

SEQ ID NO: 2250 - DNA, 25 bp, Homo sapiens
gtcctggcctccccgcagtgaatcc

SEQ ID NO: 2251 - DNA, 25 bp, Homo sapiens
tcctggcctccccgcagtgaatccc

SEQ ID NO: 2252 - DNA, 25 bp, Homo sapiens
cctggcctccccgcagtgaatccca

SEQ ID NO: 2253 - DNA, 25 bp, Homo sapiens
ctggcctccccgcagtgaatcccag

SEQ ID NO: 2254 - DNA, 25 bp, Homo sapiens
tggcctccccgcagtgaatcccaga

SEQ ID NO: 2255 - DNA, 25 bp, Homo sapiens
ggcctccccgcagtgaatcccagag

SEQ ID NO: 2256 - DNA, 25 bp, Homo sapiens
gcctccccgcagtgaatcccagaga

SEQ ID NO: 2257 - DNA, 25 bp, Homo sapiens
cctccccgcagtgaatcccagagac

SEQ ID NO: 2258 - DNA, 25 bp, Homo sapiens
ctccccgcagtgaatcccagagacc

SEQ ID NO: 2259 - DNA, 25 bp, Homo sapiens
tccccgcagtgaatcccagagacca

SEQ ID NO: 2260 - DNA, 25 bp, Homo sapiens
ccccgcagtgaatcccagagaccaa

SEQ ID NO: 2261 - DNA, 25 bp, Homo sapiens
cccgcagtgaatcccagagaccaag

SEQ ID NO: 2262 - DNA, 25 bp, Homo sapiens
ccgcagtgaatcccagagaccaaga

SEQ ID NO: 2263 - DNA, 25 bp, Homo sapiens
cgcagtgaatcccagagaccaagag

SEQ ID NO: 2264 - DNA, 25 bp, Homo sapiens
gcagtgaatcccagagaccaagaga

SEQ ID NO: 2265 - DNA, 25 bp, Homo sapiens
cagtgaatcccagagaccaagagat

SEQ ID NO: 2266 - DNA, 25 bp, Homo sapiens
agtgaatcccagagaccaagagatg

SEQ ID NO: 2267 - DNA, 25 bp, Homo sapiens
gtgaatcccagagaccaagagatgg

SEQ ID NO: 2268 - DNA, 25 bp, Homo sapiens
tgaatcccagagaccaagagatggc

SEQ ID NO: 2269 - DNA, 25 bp, Homo sapiens
gaatcccagagaccaagagatggca

SEQ ID NO: 2270 - DNA, 25 bp, Homo sapiens
aatcccagagaccaagagatggcag

SEQ ID NO: 2271 - DNA, 25 bp, Homo sapiens
atcccagagaccaagagatggcagc

SEQ ID NO: 2272 - DNA, 25 bp, Homo sapiens
tcccagagaccaagagatggcagct

SEQ ID NO: 2273 - DNA, 25 bp, Homo sapiens
cccagagaccaagagatggcagctg

SEQ ID NO: 2274 - DNA, 25 bp, Homo sapiens
ccagagaccaagagatggcagctgg

SEQ ID NO: 2275 - DNA, 25 bp, Homo sapiens
cagagaccaagagatggcagctggg

SEQ ID NO: 2276 - DNA, 25 bp, Homo sapiens
agagaccaagagatggcagctgggt

SEQ ID NO: 2277 - DNA, 25 bp, Homo sapiens
gagaccaagagatggcagctgggtt

SEQ ID NO: 2278 - DNA, 25 bp, Homo sapiens
agaccaagagatggcagctgggttc

SEQ ID NO: 2279 - DNA, 25 bp, Homo sapiens
gaccaagagatggcagctgggttct

SEQ ID NO: 2280 - DNA, 25 bp, Homo sapiens
accaagagatggcagctgggttctt

SEQ ID NO: 2281 - DNA, 25 bp, Homo sapiens
ccaagagatggcagctgggttcttt

SEQ ID NO: 2282 - DNA, 25 bp, Homo sapiens
caagagatggcagctgggttcttta

SEQ ID NO: 2283 - DNA, 25 bp, Homo sapiens
aagagatggcagctgggttctttac

SEQ ID NO: 2284 - DNA, 25 bp, Homo sapiens
agagatggcagctgggttctttact

SEQ ID NO: 2285 - DNA, 25 bp, Homo sapiens
gagatggcagctgggttctttactg

SEQ ID NO: 2286 - DNA, 25 bp, Homo sapiens
agatggcagctgggttctttactgc

SEQ ID NO: 2287 - DNA, 25 bp, Homo sapiens
gatggcagctgggttctttactgct

SEQ ID NO: 2288 - DNA, 25 bp, Homo sapiens
atggcagctgggttctttactgctg

SEQ ID NO: 2289 - DNA, 25 bp, Homo sapiens
tggcagctgggttctttactgctgg

SEQ ID NO: 2290 - DNA, 25 bp, Homo sapiens
ggcagctgggttctttactgctgga

SEQ ID NO: 2291 - DNA, 25 bp, Homo sapiens
gcagctgggttctttactgctggat

SEQ ID NO: 2292 - DNA, 25 bp, Homo sapiens
cagctgggttctttactgctggatc

SEQ ID NO: 2293 - DNA, 25 bp, Homo sapiens
agctgggttctttactgctggatcg

SEQ ID NO: 2294 - DNA, 25 bp, Homo sapiens
gctgggttctttactgctggatcgc

SEQ ID NO: 2295 - DNA, 25 bp, Homo sapiens
ctgggttctttactgctggatcgca

SEQ ID NO: 2296 - DNA, 25 bp, Homo sapiens
tgggttctttactgctggatcgcag

SEQ ID NO: 2297 - DNA, 25 bp, Homo sapiens
gggttctttactgctggatcgcagg

SEQ ID NO: 2298 - DNA, 25 bp, Homo sapiens
ggttctttactgctggatcgcaggg

SEQ ID NO: 2299 - DNA, 25 bp, Homo sapiens
gttctttactgctggatcgcagggg

SEQ ID NO: 2300 - DNA, 25 bp, Homo sapiens
ttctttactgctggatcgcaggggt

SEQ ID NO: 2301 - DNA, 25 bp, Homo sapiens
tctttactgctggatcgcaggggtt

SEQ ID NO: 2302 - DNA, 25 bp, Homo sapiens
ctttactgctggatcgcaggggttg

SEQ ID NO: 2303 - DNA, 25 bp, Homo sapiens
tttactgctggatcgcaggggttgg

SEQ ID NO: 2304 - DNA, 25 bp, Homo sapiens
ttactgctggatcgcaggggttggg

SEQ ID NO: 2305 - DNA, 25 bp, Homo sapiens
tactgctggatcgcaggggttgggg

SEQ ID NO: 2306 - DNA, 25 bp, Homo sapiens
actgctggatcgcaggggttggggc

SEQ ID NO: 2307 - DNA, 25 bp, Homo sapiens
ctgctggatcgcaggggttggggcc

SEQ ID NO: 2308 - DNA, 25 bp, Homo sapiens
tgctggatcgcaggggttggggcca

SEQ ID NO: 2309 - DNA, 25 bp, Homo sapiens
gctggatcgcaggggttggggccat

SEQ ID NO: 2310 - DNA, 25 bp, Homo sapiens
ctggatcgcaggggttggggccatt

SEQ ID NO: 2311 - DNA, 25 bp, Homo sapiens
tggatcgcaggggttggggccattt

SEQ ID NO: 2312 - DNA, 25 bp, Homo sapiens
ggatcgcaggggttggggccattta

SEQ ID NO: 2313 - DNA, 25 bp, Homo sapiens
gatcgcaggggttggggccatttaa

SEQ ID NO: 2314 - DNA, 25 bp, Homo sapiens
atcgcaggggttggggccatttaaa

SEQ ID NO: 2315 - DNA, 25 bp, Homo sapiens
tcgcaggggttggggccatttaaag

SEQ ID NO: 2316 - DNA, 25 bp, Homo sapiens
cgcaggggttggggccatttaaaga

SEQ ID NO: 2317 - DNA, 25 bp, Homo sapiens
gcaggggttggggccatttaaagat

SEQ ID NO: 2318 - DNA, 25 bp, Homo sapiens
caggggttggggccatttaaagata

SEQ ID NO: 2319 - DNA, 25 bp, Homo sapiens
aggggttggggccatttaaagatat

SEQ ID NO: 2320 - DNA, 25 bp, Homo sapiens
ggggttggggccatttaaagatatg

SEQ ID NO: 2321 - DNA, 25 bp, Homo sapiens
gggttggggccatttaaagatatgg

SEQ ID NO: 2322 - DNA, 25 bp, Homo sapiens
ggttggggccatttaaagatatggc

SEQ ID NO: 2323 - DNA, 25 bp, Homo sapiens
gttggggccatttaaagatatggcc

SEQ ID NO: 2324 - DNA, 25 bp, Homo sapiens
ttggggccatttaaagatatggccc

SEQ ID NO: 2325 - DNA, 25 bp, Homo sapiens
tggggccatttaaagatatggccct

SEQ ID NO: 2326 - DNA, 25 bp, Homo sapiens
ggggccatttaaagatatggccctg

SEQ ID NO: 2327 - DNA, 25 bp, Homo sapiens
gggccatttaaagatatggccctgg

SEQ ID NO: 2328 - DNA, 25 bp, Homo sapiens
ggccatttaaagatatggccctggc

SEQ ID NO: 2329 - DNA, 25 bp, Homo sapiens
gccatttaaagatatggccctggcc

SEQ ID NO: 2330 - DNA, 25 bp, Homo sapiens
ccatttaaagatatggccctggcct

SEQ ID NO: 2331 - DNA, 25 bp, Homo sapiens
catttaaagatatggccctggcctt

SEQ ID NO: 2332 - DNA, 25 bp, Homo sapiens
atttaaagatatggccctggccttc

SEQ ID NO: 2333 - DNA, 25 bp, Homo sapiens
tttaaagatatggccctggccttcc

SEQ ID NO: 2334 - DNA, 25 bp, Homo sapiens
ttaaagatatggccctggccttccc

SEQ ID NO: 2335 - DNA, 25 bp, Homo sapiens
taaagatatggccctggccttccct

SEQ ID NO: 2336 - DNA, 25 bp, Homo sapiens
aaagatatggccctggccttccctg

SEQ ID NO: 2337 - DNA, 25 bp, Homo sapiens
aagatatggccctggccttccctga

SEQ ID NO: 2338 - DNA, 25 bp, Homo sapiens
agatatggccctggccttccctgag

SEQ ID NO: 2339 - DNA, 25 bp, Homo sapiens
gatatggccctggccttccctgagg

SEQ ID NO: 2340 - DNA, 25 bp, Homo sapiens
atatggccctggccttccctgagga

SEQ ID NO: 2341 - DNA, 25 bp, Homo sapiens
tatggccctggccttccctgaggag

SEQ ID NO: 2342 - DNA, 25 bp, Homo sapiens
atggccctggccttccctgaggagg

SEQ ID NO: 2343 - DNA, 25 bp, Homo sapiens
tggccctggccttccctgaggagga

SEQ ID NO: 2344 - DNA, 25 bp, Homo sapiens
ggccctggccttccctgaggaggag

SEQ ID NO: 2345 - DNA, 25 bp, Homo sapiens
gccctggccttccctgaggaggagt

SEQ ID NO: 2346 - DNA, 25 bp, Homo sapiens
ccctggccttccctgaggaggagtg

SEQ ID NO: 2347 - DNA, 25 bp, Homo sapiens
cctggccttccctgaggaggagtgg

SEQ ID NO: 2348 - DNA, 25 bp, Homo sapiens
ctggccttccctgaggaggagtgga

SEQ ID NO: 2349 - DNA, 25 bp, Homo sapiens
tggccttccctgaggaggagtggag

SEQ ID NO: 2350 - DNA, 25 bp, Homo sapiens
ggccttccctgaggaggagtggagg

SEQ ID NO: 2351 - DNA, 25 bp, Homo sapiens
gccttccctgaggaggagtggaggc

SEQ ID NO: 2352 - DNA, 25 bp, Homo sapiens
ccttccctgaggaggagtggaggca

SEQ ID NO: 2353 - DNA, 25 bp, Homo sapiens
cttccctgaggaggagtggaggcat

SEQ ID NO: 2354 - DNA, 25 bp, Homo sapiens
ttccctgaggaggagtggaggcatg

SEQ ID NO: 2355 - DNA, 25 bp, Homo sapiens
tccctgaggaggagtggaggcatgt

SEQ ID NO: 2356 - DNA, 25 bp, Homo sapiens
ccctgaggaggagtggaggcatgtg

SEQ ID NO: 2357 - DNA, 25 bp, Homo sapiens
cctgaggaggagtggaggcatgtga

SEQ ID NO: 2358 - DNA, 25 bp, Homo sapiens
ctgaggaggagtggaggcatgtgac

SEQ ID NO: 2359 - DNA, 25 bp, Homo sapiens
tgaggaggagtggaggcatgtgacc

SEQ ID NO: 2360 - DNA, 25 bp, Homo sapiens
gaggaggagtggaggcatgtgaccc

SEQ ID NO: 2361 - DNA, 25 bp, Homo sapiens
aggaggagtggaggcatgtgacccc

SEQ ID NO: 2362 - DNA, 25 bp, Homo sapiens
ggaggagtggaggcatgtgacccca

SEQ ID NO: 2363 - DNA, 25 bp, Homo sapiens
gaggagtggaggcatgtgaccccag

SEQ ID NO: 2364 - DNA, 25 bp, Homo sapiens
aggagtggaggcatgtgaccccagc

SEQ ID NO: 2365 - DNA, 25 bp, Homo sapiens
ggagtggaggcatgtgaccccagcc

SEQ ID NO: 2366 - DNA, 25 bp, Homo sapiens
gagtggaggcatgtgaccccagccc

SEQ ID NO: 2367 - DNA, 25 bp, Homo sapiens
agtggaggcatgtgaccccagccca

SEQ ID NO: 2368 - DNA, 25 bp, Homo sapiens
gtggaggcatgtgaccccagcccag

SEQ ID NO: 2369 - DNA, 25 bp, Homo sapiens
tggaggcatgtgaccccagcccaga

SEQ ID NO: 2370 - DNA, 25 bp, Homo sapiens
ggaggcatgtgaccccagcccagat

SEQ ID NO: 2371 - DNA, 25 bp, Homo sapiens
gaggcatgtgaccccagcccagata

SEQ ID NO: 2372 - DNA, 25 bp, Homo sapiens
aggcatgtgaccccagcccagatag

SEQ ID NO: 2373 - DNA, 25 bp, Homo sapiens
ggcatgtgaccccagcccagataga

SEQ ID NO: 2374 - DNA, 25 bp, Homo sapiens
gcatgtgaccccagcccagatagac

SEQ ID NO: 2375 - DNA, 25 bp, Homo sapiens
catgtgaccccagcccagatagact

SEQ ID NO: 2376 - DNA, 25 bp, Homo sapiens
atgtgaccccagcccagatagactg

SEQ ID NO: 2377 - DNA, 25 bp, Homo sapiens
tgtgaccccagcccagatagactgc

SEQ ID NO: 2378 - DNA, 25 bp, Homo sapiens
gtgaccccagcccagatagactgct

SEQ ID NO: 2379 - DNA, 25 bp, Homo sapiens
tgaccccagcccagatagactgctt

SEQ ID NO: 2380 - DNA, 25 bp, Homo sapiens
gaccccagcccagatagactgcttt

SEQ ID NO: 2381 - DNA, 25 bp, Homo sapiens
accccagcccagatagactgctttg

SEQ ID NO: 2382 - DNA, 25 bp, Homo sapiens
ccccagcccagatagactgctttgg

SEQ ID NO: 2383 - DNA, 25 bp, Homo sapiens
cccagcccagatagactgctttggg

SEQ ID NO: 2384 - DNA, 25 bp, Homo sapiens
ccagcccagatagactgctttgggg

SEQ ID NO: 2385 - DNA, 25 bp, Homo sapiens
cagcccagatagactgctttgggga

SEQ ID NO: 2386 - DNA, 25 bp, Homo sapiens
agcccagatagactgctttggggag

SEQ ID NO: 2387 - DNA, 25 bp, Homo sapiens
gcccagatagactgctttggggagt

SEQ ID NO: 2388 - DNA, 25 bp, Homo sapiens
cccagatagactgctttggggagta

SEQ ID NO: 2389 - DNA, 25 bp, Homo sapiens
ccagatagactgctttggggagtat

SEQ ID NO: 2390 - DNA, 25 bp, Homo sapiens
cagatagactgctttggggagtatg

SEQ ID NO: 2391 - DNA, 25 bp, Homo sapiens
agatagactgctttggggagtatgt

SEQ ID NO: 2392 - DNA, 25 bp, Homo sapiens
gatagactgctttggggagtatgtg

SEQ ID NO: 2393 - DNA, 25 bp, Homo sapiens
atagactgctttggggagtatgtgg

SEQ ID NO: 2394 - DNA, 25 bp, Homo sapiens
tagactgctttggggagtatgtgga

SEQ ID NO: 2395 - DNA, 25 bp, Homo sapiens
agactgctttggggagtatgtggaa

SEQ ID NO: 2396 - DNA, 25 bp, Homo sapiens
gactgctttggggagtatgtggaac

SEQ ID NO: 2397 - DNA, 25 bp, Homo sapiens
actgctttggggagtatgtggaacc

SEQ ID NO: 2398 - DNA, 25 bp, Homo sapiens
ctgctttggggagtatgtggaaccg

SEQ ID NO: 2399 - DNA, 25 bp, Homo sapiens
tgctttggggagtatgtggaaccgc

SEQ ID NO: 2400 - DNA, 25 bp, Homo sapiens
gctttggggagtatgtggaaccgca

SEQ ID NO: 2401 - DNA, 25 bp, Homo sapiens
ctttggggagtatgtggaaccgcag

SEQ ID NO: 2402 - DNA, 25 bp, Homo sapiens
tttggggagtatgtggaaccgcagg

SEQ ID NO: 2403 - DNA, 25 bp, Homo sapiens
ttggggagtatgtggaaccgcagga

SEQ ID NO: 2404 - DNA, 25 bp, Homo sapiens
tggggagtatgtggaaccgcaggac

SEQ ID NO: 2405 - DNA, 25 bp, Homo sapiens
ggggagtatgtggaaccgcaggact

SEQ ID NO: 2406 - DNA, 25 bp, Homo sapiens
gggagtatgtggaaccgcaggactg

SEQ ID NO: 2407 - DNA, 25 bp, Homo sapiens
ggagtatgtggaaccgcaggactgc

SEQ ID NO: 2408 - DNA, 25 bp, Homo sapiens
gagtatgtggaaccgcaggactgca

SEQ ID NO: 2409 - DNA, 25 bp, Homo sapiens
agtatgtggaaccgcaggactgcag

SEQ ID NO: 2410 - DNA, 25 bp, Homo sapiens
gtatgtggaaccgcaggactgcagg

SEQ ID NO: 2411 - DNA, 25 bp, Homo sapiens
tatgtggaaccgcaggactgcaggg

SEQ ID NO: 2412 - DNA, 25 bp, Homo sapiens
atgtggaaccgcaggactgcagggt

SEQ ID NO: 2413 - DNA, 25 bp, Homo sapiens
tgtggaaccgcaggactgcagggtc

SEQ ID NO: 2414 - DNA, 25 bp, Homo sapiens
gtggaaccgcaggactgcagggtct

SEQ ID NO: 2415 - DNA, 25 bp, Homo sapiens
tggaaccgcaggactgcagggtctc

SEQ ID NO: 2416 - DNA, 25 bp, Homo sapiens
ggaaccgcaggactgcagggtctct

SEQ ID NO: 2417 - DNA, 25 bp, Homo sapiens
gaaccgcaggactgcagggtctctc

SEQ ID NO: 2418 - DNA, 25 bp, Homo sapiens
aaccgcaggactgcagggtctctcc

SEQ ID NO: 2419 - DNA, 25 bp, Homo sapiens
accgcaggactgcagggtctctcca

SEQ ID NO: 2420 - DNA, 25 bp, Homo sapiens
ccgcaggactgcagggtctctccag

SEQ ID NO: 2421 - DNA, 25 bp, Homo sapiens
cgcaggactgcagggtctctccagg

SEQ ID NO: 2422 - DNA, 25 bp, Homo sapiens
gcaggactgcagggtctctccaggc

SEQ ID NO: 2423 - DNA, 25 bp, Homo sapiens
caggactgcagggtctctccaggcg

SEQ ID NO: 2424 - DNA, 25 bp, Homo sapiens
aggactgcagggtctctccaggcgg

SEQ ID NO: 2425 - DNA, 25 bp, Homo sapiens
ggactgcagggtctctccaggcggt

SEQ ID NO: 2426 - DNA, 25 bp, Homo sapiens
gactgcagggtctctccaggcggtg

SEQ ID NO: 2427 - DNA, 25 bp, Homo sapiens
actgcagggtctctccaggcggtgg

SEQ ID NO: 2428 - DNA, 25 bp, Homo sapiens
ctgcagggtctctccaggcggtggg

SEQ ID NO: 2429 - DNA, 25 bp, Homo sapiens
tgcagggtctctccaggcggtggga

SEQ ID NO: 2430 - DNA, 25 bp, Homo sapiens
gcagggtctctccaggcggtgggag

SEQ ID NO: 2431 - DNA, 25 bp, Homo sapiens
cagggtctctccaggcggtgggagc

SEQ ID NO: 2432 - DNA, 25 bp, Homo sapiens
agggtctctccaggcggtgggagca

SEQ ID NO: 2433 - DNA, 25 bp, Homo sapiens
gggtctctccaggcggtgggagcaa

SEQ ID NO: 2434 - DNA, 25 bp, Homo sapiens
ggtctctccaggcggtgggagcaag

SEQ ID NO: 2435 - DNA, 25 bp, Homo sapiens
gtctctccaggcggtgggagcaagg

SEQ ID NO: 2436 - DNA, 25 bp, Homo sapiens
tctctccaggcggtgggagcaagga

SEQ ID NO: 2437 - DNA, 25 bp, Homo sapiens
ctctccaggcggtgggagcaaggaa

SEQ ID NO: 2438 - DNA, 25 bp, Homo sapiens
tctccaggcggtgggagcaaggaaa

SEQ ID NO: 2439 - DNA, 25 bp, Homo sapiens
ctccaggcggtgggagcaaggaaaa

SEQ ID NO: 2440 - DNA, 25 bp, Homo sapiens
tccaggcggtgggagcaaggaaaag

SEQ ID NO: 2441 - DNA, 25 bp, Homo sapiens
ccaggcggtgggagcaaggaaaagg

SEQ ID NO: 2442 - DNA, 25 bp, Homo sapiens
caggcggtgggagcaaggaaaagga

SEQ ID NO: 2443 - DNA, 25 bp, Homo sapiens
aggcggtgggagcaaggaaaaggag

SEQ ID NO: 2444 - DNA, 25 bp, Homo sapiens
ggcggtgggagcaaggaaaaggagg

SEQ ID NO: 2445 - DNA, 25 bp, Homo sapiens
gcggtgggagcaaggaaaaggaggc

SEQ ID NO: 2446 - DNA, 25 bp, Homo sapiens
cggtgggagcaaggaaaaggaggca

SEQ ID NO: 2447 - DNA, 25 bp, Homo sapiens
ggtgggagcaaggaaaaggaggcaa

SEQ ID NO: 2448 - DNA, 25 bp, Homo sapiens
gtgggagcaaggaaaaggaggcaaa

SEQ ID NO: 2449 - DNA, 25 bp, Homo sapiens
tgggagcaaggaaaaggaggcaaaa

SEQ ID NO: 2450 - DNA, 25 bp, Homo sapiens
gggagcaaggaaaaggaggcaaaac

SEQ ID NO: 2451 - DNA, 25 bp, Homo sapiens
ggagcaaggaaaaggaggcaaaacc

SEQ ID NO: 2452 - DNA, 25 bp, Homo sapiens
gagcaaggaaaaggaggcaaaaccc

SEQ ID NO: 2453 - DNA, 25 bp, Homo sapiens
agcaaggaaaaggaggcaaaacccc

SEQ ID NO: 2454 - DNA, 25 bp, Homo sapiens
gcaaggaaaaggaggcaaaaccccc

SEQ ID NO: 2455 - DNA, 25 bp, Homo sapiens
caaggaaaaggaggcaaaaccccca

SEQ ID NO: 2456 - DNA, 25 bp, Homo sapiens
aaggaaaaggaggcaaaacccccac

SEQ ID NO: 2457 - DNA, 25 bp, Homo sapiens
aggaaaaggaggcaaaacccccaca

SEQ ID NO: 2458 - DNA, 25 bp, Homo sapiens
ggaaaaggaggcaaaacccccacag

SEQ ID NO: 2459 - DNA, 25 bp, Homo sapiens
gaaaaggaggcaaaacccccacagg

SEQ ID NO: 2460 - DNA, 25 bp, Homo sapiens
aaaaggaggcaaaacccccacagga

SEQ ID NO: 2461 - DNA, 25 bp, Homo sapiens
aaaggaggcaaaacccccacaggaa

SEQ ID NO: 2462 - DNA, 25 bp, Homo sapiens
aaggaggcaaaacccccacaggaag

SEQ ID NO: 2463 - DNA, 25 bp, Homo sapiens
aggaggcaaaacccccacaggaaga

SEQ ID NO: 2464 - DNA, 25 bp, Homo sapiens
ggaggcaaaacccccacaggaagac

SEQ ID NO: 2465 - DNA, 25 bp, Homo sapiens
gaggcaaaacccccacaggaagacc

SEQ ID NO: 2466 - DNA, 25 bp, Homo sapiens
aggcaaaacccccacaggaagacct

SEQ ID NO: 2467 - DNA, 25 bp, Homo sapiens
ggcaaaacccccacaggaagacctg

SEQ ID NO: 2468 - DNA, 25 bp, Homo sapiens
gcaaaacccccacaggaagacctga

SEQ ID NO: 2469 - DNA, 25 bp, Homo sapiens
caaaacccccacaggaagacctgaa

SEQ ID NO: 2470 - DNA, 25 bp, Homo sapiens
aaaacccccacaggaagacctgaaa

SEQ ID NO: 2471 - DNA, 25 bp, Homo sapiens
aaacccccacaggaagacctgaaag

SEQ ID NO: 2472 - DNA, 25 bp, Homo sapiens
aacccccacaggaagacctgaaagg

SEQ ID NO: 2473 - DNA, 25 bp, Homo sapiens
acccccacaggaagacctgaaaggg

SEQ ID NO: 2474 - DNA, 25 bp, Homo sapiens
cccccacaggaagacctgaaagggg

SEQ ID NO: 2475 - DNA, 25 bp, Homo sapiens
ccccacaggaagacctgaaaggggc

SEQ ID NO: 2476 - DNA, 25 bp, Homo sapiens
cccacaggaagacctgaaaggggcg

SEQ ID NO: 2477 - DNA, 25 bp, Homo sapiens
ccacaggaagacctgaaaggggcgc

SEQ ID NO: 2478 - DNA, 25 bp, Homo sapiens
cacaggaagacctgaaaggggcgct

SEQ ID NO: 2479 - DNA, 25 bp, Homo sapiens
acaggaagacctgaaaggggcgctg

SEQ ID NO: 2480 - DNA, 25 bp, Homo sapiens
caggaagacctgaaaggggcgctgg

SEQ ID NO: 2481 - DNA, 25 bp, Homo sapiens
aggaagacctgaaaggggcgctggt

SEQ ID NO: 2482 - DNA, 25 bp, Homo sapiens
ggaagacctgaaaggggcgctggtg

SEQ ID NO: 2483 - DNA, 25 bp, Homo sapiens
gaagacctgaaaggggcgctggtgg

SEQ ID NO: 2484 - DNA, 25 bp, Homo sapiens
aagacctgaaaggggcgctggtggc

SEQ ID NO: 2485 - DNA, 25 bp, Homo sapiens
agacctgaaaggggcgctggtggca

SEQ ID NO: 2486 - DNA, 25 bp, Homo sapiens
gacctgaaaggggcgctggtggcac

SEQ ID NO: 2487 - DNA, 25 bp, Homo sapiens
acctgaaaggggcgctggtggcact

SEQ ID NO: 2488 - DNA, 25 bp, Homo sapiens
cctgaaaggggcgctggtggcactg

SEQ ID NO: 2489 - DNA, 25 bp, Homo sapiens
ctgaaaggggcgctggtggcactga

SEQ ID NO: 2490 - DNA, 25 bp, Homo sapiens
tgaaaggggcgctggtggcactgac

SEQ ID NO: 2491 - DNA, 25 bp, Homo sapiens
gaaaggggcgctggtggcactgaca

SEQ ID NO: 2492 - DNA, 25 bp, Homo sapiens
aaaggggcgctggtggcactgacat

SEQ ID NO: 2493 - DNA, 25 bp, Homo sapiens
aaggggcgctggtggcactgacatc

SEQ ID NO: 2494 - DNA, 25 bp, Homo sapiens
aggggcgctggtggcactgacatca

SEQ ID NO: 2495 - DNA, 25 bp, Homo sapiens
ggggcgctggtggcactgacatcag

SEQ ID NO: 2496 - DNA, 25 bp, Homo sapiens
gggcgctggtggcactgacatcaga

SEQ ID NO: 2497 - DNA, 25 bp, Homo sapiens
ggcgctggtggcactgacatcagag

SEQ ID NO: 2498 - DNA, 25 bp, Homo sapiens
gcgctggtggcactgacatcagaga

SEQ ID NO: 2499 - DNA, 25 bp, Homo sapiens
cgctggtggcactgacatcagagag

SEQ ID NO: 2500 - DNA, 25 bp, Homo sapiens
gctggtggcactgacatcagagagg

SEQ ID NO: 2501 - DNA, 25 bp, Homo sapiens
ctggtggcactgacatcagagaggt

SEQ ID NO: 2502 - DNA, 25 bp, Homo sapiens
tggtggcactgacatcagagaggtt

SEQ ID NO: 2503 - DNA, 25 bp, Homo sapiens
ggtggcactgacatcagagaggttt

SEQ ID NO: 2504 - DNA, 25 bp, Homo sapiens
gtggcactgacatcagagaggtttg

SEQ ID NO: 2505 - DNA, 25 bp, Homo sapiens
tggcactgacatcagagaggtttgg

SEQ ID NO: 2506 - DNA, 25 bp, Homo sapiens
ggcactgacatcagagaggtttggg

SEQ ID NO: 2507 - DNA, 25 bp, Homo sapiens
gcactgacatcagagaggtttgggg

SEQ ID NO: 2508 - DNA, 25 bp, Homo sapiens
cactgacatcagagaggtttgggga

SEQ ID NO: 2509 - DNA, 25 bp, Homo sapiens
actgacatcagagaggtttggggaa

SEQ ID NO: 2510 - DNA, 25 bp, Homo sapiens
ctgacatcagagaggtttggggaag

SEQ ID NO: 2511 - DNA, 25 bp, Homo sapiens
tgacatcagagaggtttggggaagc

SEQ ID NO: 2512 - DNA, 25 bp, Homo sapiens
gacatcagagaggtttggggaagcc

SEQ ID NO: 2513 - DNA, 25 bp, Homo sapiens
acatcagagaggtttggggaagcct

SEQ ID NO: 2514 - DNA, 25 bp, Homo sapiens
catcagagaggtttggggaagcctc

SEQ ID NO: 2515 - DNA, 25 bp, Homo sapiens
atcagagaggtttggggaagcctct

SEQ ID NO: 2516 - DNA, 25 bp, Homo sapiens
tcagagaggtttggggaagcctctc

SEQ ID NO: 2517 - DNA, 25 bp, Homo sapiens
cagagaggtttggggaagcctctct

SEQ ID NO: 2518 - DNA, 25 bp, Homo sapiens
agagaggtttggggaagcctctctc

SEQ ID NO: 2519 - DNA, 25 bp, Homo sapiens
gagaggtttggggaagcctctctcc

SEQ ID NO: 2520 - DNA, 25 bp, Homo sapiens
agaggtttggggaagcctctctcca

SEQ ID NO: 2521 - DNA, 25 bp, Homo sapiens
gaggtttggggaagcctctctccag

SEQ ID NO: 2522 - DNA, 25 bp, Homo sapiens
aggtttggggaagcctctctccagg

SEQ ID NO: 2523 - DNA, 25 bp, Homo sapiens
ggtttggggaagcctctctccaggg

SEQ ID NO: 2524 - DNA, 25 bp, Homo sapiens
gtttggggaagcctctctccagggc

SEQ ID NO: 2525 - DNA, 25 bp, Homo sapiens
tttggggaagcctctctccagggcc

SEQ ID NO: 2526 - DNA, 25 bp, Homo sapiens
ttggggaagcctctctccagggccc

SEQ ID NO: 2527 - DNA, 25 bp, Homo sapiens
tggggaagcctctctccagggccct

SEQ ID NO: 2528 - DNA, 25 bp, Homo sapiens
ggggaagcctctctccagggccctg

SEQ ID NO: 2529 - DNA, 25 bp, Homo sapiens
gggaagcctctctccagggccctgg

SEQ ID NO: 2530 - DNA, 25 bp, Homo sapiens
ggaagcctctctccagggccctggg

SEQ ID NO: 2531 - DNA, 25 bp, Homo sapiens
gaagcctctctccagggccctgggc

SEQ ID NO: 2532 - DNA, 25 bp, Homo sapiens
aagcctctctccagggccctgggct

SEQ ID NO: 2533 - DNA, 25 bp, Homo sapiens
agcctctctccagggccctgggctc

SEQ ID NO: 2534 - DNA, 25 bp, Homo sapiens
gcctctctccagggccctgggctcg

SEQ ID NO: 2535 - DNA, 25 bp, Homo sapiens
cctctctccagggccctgggctcgg

SEQ ID NO: 2536 - DNA, 25 bp, Homo sapiens
ctctctccagggccctgggctcgga

SEQ ID NO: 2537 - DNA, 25 bp, Homo sapiens
tctctccagggccctgggctcggaa

SEQ ID NO: 2538 - DNA, 25 bp, Homo sapiens
ctctccagggccctgggctcggaag

SEQ ID NO: 2539 - DNA, 25 bp, Homo sapiens
tctccagggccctgggctcggaagg

SEQ ID NO: 2540 - DNA, 25 bp, Homo sapiens
ctccagggccctgggctcggaaggg

SEQ ID NO: 2541 - DNA, 25 bp, Homo sapiens
tccagggccctgggctcggaagggt

SEQ ID NO: 2542 - DNA, 25 bp, Homo sapiens
ccagggccctgggctcggaagggtc

SEQ ID NO: 2543 - DNA, 25 bp, Homo sapiens
cagggccctgggctcggaagggtct

SEQ ID NO: 2544 - DNA, 25 bp, Homo sapiens
agggccctgggctcggaagggtctg

SEQ ID NO: 2545 - DNA, 25 bp, Homo sapiens
gggccctgggctcggaagggtctgt

SEQ ID NO: 2546 - DNA, 25 bp, Homo sapiens
ggccctgggctcggaagggtctgtg

SEQ ID NO: 2547 - DNA, 25 bp, Homo sapiens
gccctgggctcggaagggtctgtga

SEQ ID NO: 2548 - DNA, 25 bp, Homo sapiens
ccctgggctcggaagggtctgtgag

SEQ ID NO: 2549 - DNA, 25 bp, Homo sapiens
cctgggctcggaagggtctgtgagc

SEQ ID NO: 2550 - DNA, 25 bp, Homo sapiens
ctgggctcggaagggtctgtgagca

SEQ ID NO: 2551 - DNA, 25 bp, Homo sapiens
tgggctcggaagggtctgtgagcag

SEQ ID NO: 2552 - DNA, 25 bp, Homo sapiens
gggctcggaagggtctgtgagcagg

SEQ ID NO: 2553 - DNA, 25 bp, Homo sapiens
ggctcggaagggtctgtgagcagga

SEQ ID NO: 2554 - DNA, 25 bp, Homo sapiens
gctcggaagggtctgtgagcaggag

SEQ ID NO: 2555 - DNA, 25 bp, Homo sapiens
ctcggaagggtctgtgagcaggagc

SEQ ID NO: 2556 - DNA, 25 bp, Homo sapiens
tcggaagggtctgtgagcaggagcc

SEQ ID NO: 2557 - DNA, 25 bp, Homo sapiens
cggaagggtctgtgagcaggagcct

SEQ ID NO: 2558 - DNA, 25 bp, Homo sapiens
ggaagggtctgtgagcaggagcctg

SEQ ID NO: 2559 - DNA, 25 bp, Homo sapiens
gaagggtctgtgagcaggagcctgg

SEQ ID NO: 2560 - DNA, 25 bp, Homo sapiens
aagggtctgtgagcaggagcctggt

SEQ ID NO: 2561 - DNA, 25 bp, Homo sapiens
agggtctgtgagcaggagcctggtg

SEQ ID NO: 2562 - DNA, 25 bp, Homo sapiens
gggtctgtgagcaggagcctggtgg

SEQ ID NO: 2563 - DNA, 25 bp, Homo sapiens
ggtctgtgagcaggagcctggtggc

SEQ ID NO: 2564 - DNA, 25 bp, Homo sapiens
gtctgtgagcaggagcctggtggcc

SEQ ID NO: 2565 - DNA, 25 bp, Homo sapiens
tctgtgagcaggagcctggtggccc

SEQ ID NO: 2566 - DNA, 25 bp, Homo sapiens
ctgtgagcaggagcctggtggccct

SEQ ID NO: 2567 - DNA, 25 bp, Homo sapiens
tgtgagcaggagcctggtggccctg

SEQ ID NO: 2568 - DNA, 25 bp, Homo sapiens
gtgagcaggagcctggtggccctgc

SEQ ID NO: 2569 - DNA, 25 bp, Homo sapiens
tgagcaggagcctggtggccctgca

SEQ ID NO: 2570 - DNA, 25 bp, Homo sapiens
gagcaggagcctggtggccctgcag

SEQ ID NO: 2571 - DNA, 25 bp, Homo sapiens
agcaggagcctggtggccctgcagg

SEQ ID NO: 2572 - DNA, 25 bp, Homo sapiens
gcaggagcctggtggccctgcaggc

SEQ ID NO: 2573 - DNA, 25 bp, Homo sapiens
caggagcctggtggccctgcaggca

SEQ ID NO: 2574 - DNA, 25 bp, Homo sapiens
aggagcctggtggccctgcaggcag

SEQ ID NO: 2575 - DNA, 25 bp, Homo sapiens
ggagcctggtggccctgcaggcagt

SEQ ID NO: 2576 - DNA, 25 bp, Homo sapiens
gagcctggtggccctgcaggcagtg

SEQ ID NO: 2577 - DNA, 25 bp, Homo sapiens
agcctggtggccctgcaggcagtgc

SEQ ID NO: 2578 - DNA, 25 bp, Homo sapiens
gcctggtggccctgcaggcagtgcg

SEQ ID NO: 2579 - DNA, 25 bp, Homo sapiens
cctggtggccctgcaggcagtgcgc

SEQ ID NO: 2580 - DNA, 25 bp, Homo sapiens
ctggtggccctgcaggcagtgcgcc

SEQ ID NO: 2581 - DNA, 25 bp, Homo sapiens
tggtggccctgcaggcagtgcgcct

SEQ ID NO: 2582 - DNA, 25 bp, Homo sapiens
ggtggccctgcaggcagtgcgcctg

SEQ ID NO: 2583 - DNA, 25 bp, Homo sapiens
gtggccctgcaggcagtgcgcctgg

SEQ ID NO: 2584 - DNA, 25 bp, Homo sapiens
tggccctgcaggcagtgcgcctggg

SEQ ID NO: 2585 - DNA, 25 bp, Homo sapiens
ggccctgcaggcagtgcgcctgggc

SEQ ID NO: 2586 - DNA, 25 bp, Homo sapiens
gccctgcaggcagtgcgcctgggct

SEQ ID NO: 2587 - DNA, 25 bp, Homo sapiens
ccctgcaggcagtgcgcctgggctt

SEQ ID NO: 2588 - DNA, 25 bp, Homo sapiens
cctgcaggcagtgcgcctgggcttc

SEQ ID NO: 2589 - DNA, 25 bp, Homo sapiens
ctgcaggcagtgcgcctgggcttcc

SEQ ID NO: 2590 - DNA, 25 bp, Homo sapiens
tgcaggcagtgcgcctgggcttcct

SEQ ID NO: 2591 - DNA, 25 bp, Homo sapiens
gcaggcagtgcgcctgggcttcctc

SEQ ID NO: 2592 - DNA, 25 bp, Homo sapiens
caggcagtgcgcctgggcttcctcc

SEQ ID NO: 2593 - DNA, 25 bp, Homo sapiens
aggcagtgcgcctgggcttcctcct

SEQ ID NO: 2594 - DNA, 25 bp, Homo sapiens
ggcagtgcgcctgggcttcctcctc

SEQ ID NO: 2595 - DNA, 25 bp, Homo sapiens
gcagtgcgcctgggcttcctcctcc

SEQ ID NO: 2596 - DNA, 25 bp, Homo sapiens
cagtgcgcctgggcttcctcctccc

SEQ ID NO: 2597 - DNA, 25 bp, Homo sapiens
agtgcgcctgggcttcctcctcccc

SEQ ID NO: 2598 - DNA, 25 bp, Homo sapiens
gtgcgcctgggcttcctcctcccca

SEQ ID NO: 2599 - DNA, 25 bp, Homo sapiens
tgcgcctgggcttcctcctccccag

SEQ ID NO: 2600 - DNA, 25 bp, Homo sapiens
gcgcctgggcttcctcctccccagc

SEQ ID NO: 2601 - DNA, 25 bp, Homo sapiens
cgcctgggcttcctcctccccagca

SEQ ID NO: 2602 - DNA, 25 bp, Homo sapiens
gcctgggcttcctcctccccagcac

SEQ ID NO: 2603 - DNA, 25 bp, Homo sapiens
cctgggcttcctcctccccagcacg

SEQ ID NO: 2604 - DNA, 25 bp, Homo sapiens
ctgggcttcctcctccccagcacgg

SEQ ID NO: 2605 - DNA, 25 bp, Homo sapiens
tgggcttcctcctccccagcacggt

SEQ ID NO: 2606 - DNA, 25 bp, Homo sapiens
gggcttcctcctccccagcacggtg

SEQ ID NO: 2607 - DNA, 25 bp, Homo sapiens
ggcttcctcctccccagcacggtgc

SEQ ID NO: 2608 - DNA, 25 bp, Homo sapiens
gcttcctcctccccagcacggtgcc

SEQ ID NO: 2609 - DNA, 25 bp, Homo sapiens
cttcctcctccccagcacggtgcca

SEQ ID NO: 2610 - DNA, 25 bp, Homo sapiens
ttcctcctccccagcacggtgccat

SEQ ID NO: 2611 - DNA, 25 bp, Homo sapiens
tcctcctccccagcacggtgccatc

SEQ ID NO: 2612 - DNA, 25 bp, Homo sapiens
cctcctccccagcacggtgccatcc

SEQ ID NO: 2613 - DNA, 25 bp, Homo sapiens
ctcctccccagcacggtgccatccc

SEQ ID NO: 2614 - DNA, 25 bp, Homo sapiens
tcctccccagcacggtgccatcccc

SEQ ID NO: 2615 - DNA, 25 bp, Homo sapiens
cctccccagcacggtgccatccccc

SEQ ID NO: 2616 - DNA, 25 bp, Homo sapiens
ctccccagcacggtgccatccccct

SEQ ID NO: 2617 - DNA, 25 bp, Homo sapiens
tccccagcacggtgccatccccctg

SEQ ID NO: 2618 - DNA, 25 bp, Homo sapiens
ccccagcacggtgccatccccctgc

SEQ ID NO: 2619 - DNA, 25 bp, Homo sapiens
cccagcacggtgccatccccctgcc

SEQ ID NO: 2620 - DNA, 25 bp, Homo sapiens
ccagcacggtgccatccccctgcct

SEQ ID NO: 2621 - DNA, 25 bp, Homo sapiens
cagcacggtgccatccccctgcctg

SEQ ID NO: 2622 - DNA, 25 bp, Homo sapiens
agcacggtgccatccccctgcctga

SEQ ID NO: 2623 - DNA, 25 bp, Homo sapiens
gcacggtgccatccccctgcctgac

SEQ ID NO: 2624 - DNA, 25 bp, Homo sapiens
cacggtgccatccccctgcctgacg

SEQ ID NO: 2625 - DNA, 25 bp, Homo sapiens
acggtgccatccccctgcctgacga

SEQ ID NO: 2626 - DNA, 25 bp, Homo sapiens
cggtgccatccccctgcctgacgaa

SEQ ID NO: 2627 - DNA, 25 bp, Homo sapiens
ggtgccatccccctgcctgacgaag

SEQ ID NO: 2628 - DNA, 25 bp, Homo sapiens
gtgccatccccctgcctgacgaagt

SEQ ID NO: 2629 - DNA, 25 bp, Homo sapiens
tgccatccccctgcctgacgaagtc

SEQ ID NO: 2630 - DNA, 25 bp, Homo sapiens
gccatccccctgcctgacgaagtca

SEQ ID NO: 2631 - DNA, 25 bp, Homo sapiens
ccatccccctgcctgacgaagtcaa

SEQ ID NO: 2632 - DNA, 25 bp, Homo sapiens
catccccctgcctgacgaagtcaaa

SEQ ID NO: 2633 - DNA, 25 bp, Homo sapiens
atccccctgcctgacgaagtcaaaa

SEQ ID NO: 2634 - DNA, 25 bp, Homo sapiens
tccccctgcctgacgaagtcaaaac

SEQ ID NO: 2635 - DNA, 25 bp, Homo sapiens
ccccctgcctgacgaagtcaaaacc

SEQ ID NO: 2636 - DNA, 25 bp, Homo sapiens
cccctgcctgacgaagtcaaaaccc

SEQ ID NO: 2637 - DNA, 25 bp, Homo sapiens
ccctgcctgacgaagtcaaaaccca

SEQ ID NO: 2638 - DNA, 25 bp, Homo sapiens
cctgcctgacgaagtcaaaacccac

SEQ ID NO: 2639 - DNA, 25 bp, Homo sapiens
ctgcctgacgaagtcaaaacccaca

SEQ ID NO: 2640 - DNA, 25 bp, Homo sapiens
tgcctgacgaagtcaaaacccacag

SEQ ID NO: 2641 - DNA, 25 bp, Homo sapiens
gcctgacgaagtcaaaacccacagc

SEQ ID NO: 2642 - DNA, 25 bp, Homo sapiens
cctgacgaagtcaaaacccacagct

SEQ ID NO: 2643 - DNA, 25 bp, Homo sapiens
ctgacgaagtcaaaacccacagctc

SEQ ID NO: 2644 - DNA, 25 bp, Homo sapiens
tgacgaagtcaaaacccacagctcc

SEQ ID NO: 2645 - DNA, 25 bp, Homo sapiens
gacgaagtcaaaacccacagctcct

SEQ ID NO: 2646 - DNA, 25 bp, Homo sapiens
acgaagtcaaaacccacagctcctt

SEQ ID NO: 2647 - DNA, 25 bp, Homo sapiens
cgaagtcaaaacccacagctccttc

SEQ ID NO: 2648 - DNA, 25 bp, Homo sapiens
gaagtcaaaacccacagctccttct

SEQ ID NO: 2649 - DNA, 25 bp, Homo sapiens
aagtcaaaacccacagctccttctg

SEQ ID NO: 2650 - DNA, 25 bp, Homo sapiens
agtcaaaacccacagctccttctgg

SEQ ID NO: 2651 - DNA, 25 bp, Homo sapiens
gtcaaaacccacagctccttctgga

SEQ ID NO: 2652 - DNA, 25 bp, Homo sapiens
tcaaaacccacagctccttctggaa

SEQ ID NO: 2653 - DNA, 25 bp, Homo sapiens
caaaacccacagctccttctggaag

SEQ ID NO: 2654 - DNA, 25 bp, Homo sapiens
aaaacccacagctccttctggaagc

SEQ ID NO: 2655 - DNA, 25 bp, Homo sapiens
aaacccacagctccttctggaagcc

SEQ ID NO: 2656 - DNA, 25 bp, Homo sapiens
aacccacagctccttctggaagcct

SEQ ID NO: 2657 - DNA, 25 bp, Homo sapiens
acccacagctccttctggaagcctt

SEQ ID NO: 2658 - DNA, 25 bp, Homo sapiens
cccacagctccttctggaagccttt

SEQ ID NO: 2659 - DNA, 25 bp, Homo sapiens
ccacagctccttctggaagcctttc

SEQ ID NO: 2660 - DNA, 25 bp, Homo sapiens
cacagctccttctggaagcctttcc

SEQ ID NO: 2661 - DNA, 25 bp, Homo sapiens
acagctccttctggaagcctttcca

SEQ ID NO: 2662 - DNA, 25 bp, Homo sapiens
cagctccttctggaagcctttccag

SEQ ID NO: 2663 - DNA, 25 bp, Homo sapiens
agctccttctggaagcctttccagt

SEQ ID NO: 2664 - DNA, 25 bp, Homo sapiens
gctccttctggaagcctttccagtg

SEQ ID NO: 2665 - DNA, 25 bp, Homo sapiens
ctccttctggaagcctttccagtgc

SEQ ID NO: 2666 - DNA, 25 bp, Homo sapiens
tccttctggaagcctttccagtgcc

SEQ ID NO: 2667 - DNA, 25 bp, Homo sapiens
ccttctggaagcctttccagtgccc

SEQ ID NO: 2668 - DNA, 25 bp, Homo sapiens
cttctggaagcctttccagtgccct

SEQ ID NO: 2669 - DNA, 25 bp, Homo sapiens
ttctggaagcctttccagtgccctg

SEQ ID NO: 2670 - DNA, 25 bp, Homo sapiens
tctggaagcctttccagtgccctga

SEQ ID NO: 2671 - DNA, 25 bp, Homo sapiens
ctggaagcctttccagtgccctgag

SEQ ID NO: 2672 - DNA, 25 bp, Homo sapiens
tggaagcctttccagtgccctgagt

SEQ ID NO: 2673 - DNA, 25 bp, Homo sapiens
ggaagcctttccagtgccctgagtg

SEQ ID NO: 2674 - DNA, 25 bp, Homo sapiens
gaagcctttccagtgccctgagtgt

SEQ ID NO: 2675 - DNA, 25 bp, Homo sapiens
aagcctttccagtgccctgagtgtg

SEQ ID NO: 2676 - DNA, 25 bp, Homo sapiens
agcctttccagtgccctgagtgtgg

SEQ ID NO: 2677 - DNA, 25 bp, Homo sapiens
gcctttccagtgccctgagtgtggg

SEQ ID NO: 2678 - DNA, 25 bp, Homo sapiens
cctttccagtgccctgagtgtggga

SEQ ID NO: 2679 - DNA, 25 bp, Homo sapiens
ctttccagtgccctgagtgtgggaa

SEQ ID NO: 2680 - DNA, 25 bp, Homo sapiens
tttccagtgccctgagtgtgggaaa

SEQ ID NO: 2681 - DNA, 25 bp, Homo sapiens
ttccagtgccctgagtgtgggaaag

SEQ ID NO: 2682 - DNA, 25 bp, Homo sapiens
tccagtgccctgagtgtgggaaagg

SEQ ID NO: 2683 - DNA, 25 bp, Homo sapiens
ccagtgccctgagtgtgggaaagga

SEQ ID NO: 2684 - DNA, 25 bp, Homo sapiens
cagtgccctgagtgtgggaaaggat

SEQ ID NO: 2685 - DNA, 25 bp, Homo sapiens
agtgccctgagtgtgggaaaggatt

SEQ ID NO: 2686 - DNA, 25 bp, Homo sapiens
gtgccctgagtgtgggaaaggattc

SEQ ID NO: 2687 - DNA, 25 bp, Homo sapiens
tgccctgagtgtgggaaaggattca

SEQ ID NO: 2688 - DNA, 25 bp, Homo sapiens
gccctgagtgtgggaaaggattcag

SEQ ID NO: 2689 - DNA, 25 bp, Homo sapiens
ccctgagtgtgggaaaggattcagt

SEQ ID NO: 2690 - DNA, 25 bp, Homo sapiens
cctgagtgtgggaaaggattcagtc

SEQ ID NO: 2691 - DNA, 25 bp, Homo sapiens
ctgagtgtgggaaaggattcagtcg

SEQ ID NO: 2692 - DNA, 25 bp, Homo sapiens
tgagtgtgggaaaggattcagtcgg

SEQ ID NO: 2693 - DNA, 25 bp, Homo sapiens
gagtgtgggaaaggattcagtcgga

SEQ ID NO: 2694 - DNA, 25 bp, Homo sapiens
agtgtgggaaaggattcagtcggag

SEQ ID NO: 2695 - DNA, 25 bp, Homo sapiens
gtgtgggaaaggattcagtcggagc

SEQ ID NO: 2696 - DNA, 25 bp, Homo sapiens
tgtgggaaaggattcagtcggagct

SEQ ID NO: 2697 - DNA, 25 bp, Homo sapiens
gtgggaaaggattcagtcggagctc

SEQ ID NO: 2698 - DNA, 25 bp, Homo sapiens
tgggaaaggattcagtcggagctcc

SEQ ID NO: 2699 - DNA, 25 bp, Homo sapiens
gggaaaggattcagtcggagctcca

SEQ ID NO: 2700 - DNA, 25 bp, Homo sapiens
ggaaaggattcagtcggagctccaa

SEQ ID NO: 2701 - DNA, 25 bp, Homo sapiens
gaaaggattcagtcggagctccaat

SEQ ID NO: 2702 - DNA, 25 bp, Homo sapiens
aaaggattcagtcggagctccaatc

SEQ ID NO: 2703 - DNA, 25 bp, Homo sapiens
aaggattcagtcggagctccaatct

SEQ ID NO: 2704 - DNA, 25 bp, Homo sapiens
aggattcagtcggagctccaatctc

SEQ ID NO: 2705 - DNA, 25 bp, Homo sapiens
ggattcagtcggagctccaatctcg

SEQ ID NO: 2706 - DNA, 25 bp, Homo sapiens
gattcagtcggagctccaatctcgt

SEQ ID NO: 2707 - DNA, 25 bp, Homo sapiens
attcagtcggagctccaatctcgtc

SEQ ID NO: 2708 - DNA, 25 bp, Homo sapiens
ttcagtcggagctccaatctcgtca

SEQ ID NO: 2709 - DNA, 25 bp, Homo sapiens
tcagtcggagctccaatctcgtcag

SEQ ID NO: 2710 - DNA, 25 bp, Homo sapiens
cagtcggagctccaatctcgtcagg

SEQ ID NO: 2711 - DNA, 25 bp, Homo sapiens
agtcggagctccaatctcgtcaggc

SEQ ID NO: 2712 - DNA, 25 bp, Homo sapiens
gtcggagctccaatctcgtcaggca

SEQ ID NO: 2713 - DNA, 25 bp, Homo sapiens
tcggagctccaatctcgtcaggcac

SEQ ID NO: 2714 - DNA, 25 bp, Homo sapiens
cggagctccaatctcgtcaggcacc

SEQ ID NO: 2715 - DNA, 25 bp, Homo sapiens
ggagctccaatctcgtcaggcacca

SEQ ID NO: 2716 - DNA, 25 bp, Homo sapiens
gagctccaatctcgtcaggcaccag

SEQ ID NO: 2717 - DNA, 25 bp, Homo sapiens
agctccaatctcgtcaggcaccagc

SEQ ID NO: 2718 - DNA, 25 bp, Homo sapiens
gctccaatctcgtcaggcaccagcg

SEQ ID NO: 2719 - DNA, 25 bp, Homo sapiens
ctccaatctcgtcaggcaccagcga

SEQ ID NO: 2720 - DNA, 25 bp, Homo sapiens
tccaatctcgtcaggcaccagcgaa

SEQ ID NO: 2721 - DNA, 25 bp, Homo sapiens
ccaatctcgtcaggcaccagcgaac

SEQ ID NO: 2722 - DNA, 25 bp, Homo sapiens
caatctcgtcaggcaccagcgaacc

SEQ ID NO: 2723 - DNA, 25 bp, Homo sapiens
aatctcgtcaggcaccagcgaaccc

SEQ ID NO: 2724 - DNA, 25 bp, Homo sapiens
atctcgtcaggcaccagcgaaccca

SEQ ID NO: 2725 - DNA, 25 bp, Homo sapiens
tctcgtcaggcaccagcgaacccac

SEQ ID NO: 2726 - DNA, 25 bp, Homo sapiens
ctcgtcaggcaccagcgaacccacg

SEQ ID NO: 2727 - DNA, 25 bp, Homo sapiens
tcgtcaggcaccagcgaacccacga

SEQ ID NO: 2728 - DNA, 25 bp, Homo sapiens
cgtcaggcaccagcgaacccacgaa

SEQ ID NO: 2729 - DNA, 25 bp, Homo sapiens
gtcaggcaccagcgaacccacgaag

SEQ ID NO: 2730 - DNA, 25 bp, Homo sapiens
tcaggcaccagcgaacccacgaaga

SEQ ID NO: 2731 - DNA, 25 bp, Homo sapiens
caggcaccagcgaacccacgaagag

SEQ ID NO: 2732 - DNA, 25 bp, Homo sapiens
aggcaccagcgaacccacgaagaga

SEQ ID NO: 2733 - DNA, 25 bp, Homo sapiens
ggcaccagcgaacccacgaagagaa

SEQ ID NO: 2734 - DNA, 25 bp, Homo sapiens
gcaccagcgaacccacgaagagaag

SEQ ID NO: 2735 - DNA, 25 bp, Homo sapiens
caccagcgaacccacgaagagaagt

SEQ ID NO: 2736 - DNA, 25 bp, Homo sapiens
accagcgaacccacgaagagaagtc

SEQ ID NO: 2737 - DNA, 25 bp, Homo sapiens
ccagcgaacccacgaagagaagtct

SEQ ID NO: 2738 - DNA, 25 bp, Homo sapiens
cagcgaacccacgaagagaagtctt

SEQ ID NO: 2739 - DNA, 25 bp, Homo sapiens
agcgaacccacgaagagaagtctta

SEQ ID NO: 2740 - DNA, 25 bp, Homo sapiens
gcgaacccacgaagagaagtcttat

SEQ ID NO: 2741 - DNA, 25 bp, Homo sapiens
cgaacccacgaagagaagtcttatg

SEQ ID NO: 2742 - DNA, 25 bp, Homo sapiens
gaacccacgaagagaagtcttatgg

SEQ ID NO: 2743 - DNA, 25 bp, Homo sapiens
aacccacgaagagaagtcttatggc

SEQ ID NO: 2744 - DNA, 25 bp, Homo sapiens
acccacgaagagaagtcttatggct

SEQ ID NO: 2745 - DNA, 25 bp, Homo sapiens
cccacgaagagaagtcttatggctg

SEQ ID NO: 2746 - DNA, 25 bp, Homo sapiens
ccacgaagagaagtcttatggctgt

SEQ ID NO: 2747 - DNA, 25 bp, Homo sapiens
cacgaagagaagtcttatggctgtg

SEQ ID NO: 2748 - DNA, 25 bp, Homo sapiens
acgaagagaagtcttatggctgtgt

SEQ ID NO: 2749 - DNA, 25 bp, Homo sapiens
cgaagagaagtcttatggctgtgtg

SEQ ID NO: 2750 - DNA, 25 bp, Homo sapiens
gaagagaagtcttatggctgtgtgg

SEQ ID NO: 2751 - DNA, 25 bp, Homo sapiens
aagagaagtcttatggctgtgtgga

SEQ ID NO: 2752 - DNA, 25 bp, Homo sapiens
agagaagtcttatggctgtgtggag

SEQ ID NO: 2753 - DNA, 25 bp, Homo sapiens
gagaagtcttatggctgtgtggagt

SEQ ID NO: 2754 - DNA, 25 bp, Homo sapiens
agaagtcttatggctgtgtggagtg

SEQ ID NO: 2755 - DNA, 25 bp, Homo sapiens
gaagtcttatggctgtgtggagtgt

SEQ ID NO: 2756 - DNA, 25 bp, Homo sapiens
aagtcttatggctgtgtggagtgtg

SEQ ID NO: 2757 - DNA, 25 bp, Homo sapiens
agtcttatggctgtgtggagtgtgg

SEQ ID NO: 2758 - DNA, 25 bp, Homo sapiens
gtcttatggctgtgtggagtgtggg

SEQ ID NO: 2759 - DNA, 25 bp, Homo sapiens
tcttatggctgtgtggagtgtggga

SEQ ID NO: 2760 - DNA, 25 bp, Homo sapiens
cttatggctgtgtggagtgtgggaa

SEQ ID NO: 2761 - DNA, 25 bp, Homo sapiens
ttatggctgtgtggagtgtgggaag

SEQ ID NO: 2762 - DNA, 25 bp, Homo sapiens
tatggctgtgtggagtgtgggaagg

SEQ ID NO: 2763 - DNA, 25 bp, Homo sapiens
atggctgtgtggagtgtgggaaggg

SEQ ID NO: 2764 - DNA, 25 bp, Homo sapiens
tggctgtgtggagtgtgggaagggc

SEQ ID NO: 2765 - DNA, 25 bp, Homo sapiens
ggctgtgtggagtgtgggaagggct

SEQ ID NO: 2766 - DNA, 25 bp, Homo sapiens
gctgtgtggagtgtgggaagggctt

SEQ ID NO: 2767 - DNA, 25 bp, Homo sapiens
ctgtgtggagtgtgggaagggcttt

SEQ ID NO: 2768 - DNA, 25 bp, Homo sapiens
tgtgtggagtgtgggaagggcttta

SEQ ID NO: 2769 - DNA, 25 bp, Homo sapiens
gtgtggagtgtgggaagggctttac

SEQ ID NO: 2770 - DNA, 25 bp, Homo sapiens
tgtggagtgtgggaagggctttacc

SEQ ID NO: 2771 - DNA, 25 bp, Homo sapiens
gtggagtgtgggaagggctttaccc

SEQ ID NO: 2772 - DNA, 25 bp, Homo sapiens
tggagtgtgggaagggctttaccct

SEQ ID NO: 2773 - DNA, 25 bp, Homo sapiens
ggagtgtgggaagggctttaccctg

SEQ ID NO: 2774 - DNA, 25 bp, Homo sapiens
gagtgtgggaagggctttaccctga

SEQ ID NO: 2775 - DNA, 25 bp, Homo sapiens
agtgtgggaagggctttaccctgag

SEQ ID NO: 2776 - DNA, 25 bp, Homo sapiens
gtgtgggaagggctttaccctgaga

SEQ ID NO: 2777 - DNA, 25 bp, Homo sapiens
tgtgggaagggctttaccctgagag

SEQ ID NO: 2778 - DNA, 25 bp, Homo sapiens
gtgggaagggctttaccctgagaga

SEQ ID NO: 2779 - DNA, 25 bp, Homo sapiens
tgggaagggctttaccctgagagag

SEQ ID NO: 2780 - DNA, 25 bp, Homo sapiens
gggaagggctttaccctgagagagt

SEQ ID NO: 2781 - DNA, 25 bp, Homo sapiens
ggaagggctttaccctgagagagta

SEQ ID NO: 2782 - DNA, 25 bp, Homo sapiens
gaagggctttaccctgagagagtac

SEQ ID NO: 2783 - DNA, 25 bp, Homo sapiens
aagggctttaccctgagagagtacc

SEQ ID NO: 2784 - DNA, 25 bp, Homo sapiens
agggctttaccctgagagagtacct

SEQ ID NO: 2785 - DNA, 25 bp, Homo sapiens
gggctttaccctgagagagtacctg

SEQ ID NO: 2786 - DNA, 25 bp, Homo sapiens
ggctttaccctgagagagtacctga

SEQ ID NO: 2787 - DNA, 25 bp, Homo sapiens
gctttaccctgagagagtacctgat

SEQ ID NO: 2788 - DNA, 25 bp, Homo sapiens
ctttaccctgagagagtacctgatg

SEQ ID NO: 2789 - DNA, 25 bp, Homo sapiens
tttaccctgagagagtacctgatga

SEQ ID NO: 2790 - DNA, 25 bp, Homo sapiens
ttaccctgagagagtacctgatgaa

SEQ ID NO: 2791 - DNA, 25 bp, Homo sapiens
taccctgagagagtacctgatgaag

SEQ ID NO: 2792 - DNA, 25 bp, Homo sapiens
accctgagagagtacctgatgaagc

SEQ ID NO: 2793 - DNA, 25 bp, Homo sapiens
ccctgagagagtacctgatgaagca

SEQ ID NO: 2794 - DNA, 25 bp, Homo sapiens
cctgagagagtacctgatgaagcac

SEQ ID NO: 2795 - DNA, 25 bp, Homo sapiens
ctgagagagtacctgatgaagcacc

SEQ ID NO: 2796 - DNA, 25 bp, Homo sapiens
tgagagagtacctgatgaagcacca

SEQ ID NO: 2797 - DNA, 25 bp, Homo sapiens
gagagagtacctgatgaagcaccag

SEQ ID NO: 2798 - DNA, 25 bp, Homo sapiens
agagagtacctgatgaagcaccaga

SEQ ID NO: 2799 - DNA, 25 bp, Homo sapiens
gagagtacctgatgaagcaccagag

SEQ ID NO: 2800 - DNA, 25 bp, Homo sapiens
agagtacctgatgaagcaccagaga

SEQ ID NO: 2801 - DNA, 25 bp, Homo sapiens
gagtacctgatgaagcaccagagaa

SEQ ID NO: 2802 - DNA, 25 bp, Homo sapiens
agtacctgatgaagcaccagagaac

SEQ ID NO: 2803 - DNA, 25 bp, Homo sapiens
gtacctgatgaagcaccagagaacc

SEQ ID NO: 2804 - DNA, 25 bp, Homo sapiens
tacctgatgaagcaccagagaaccc

SEQ ID NO: 2805 - DNA, 25 bp, Homo sapiens
acctgatgaagcaccagagaaccca

SEQ ID NO: 2806 - DNA, 25 bp, Homo sapiens
cctgatgaagcaccagagaacccac

SEQ ID NO: 2807 - DNA, 25 bp, Homo sapiens
ctgatgaagcaccagagaacccacc

SEQ ID NO: 2808 - DNA, 25 bp, Homo sapiens
tgatgaagcaccagagaacccacct

SEQ ID NO: 2809 - DNA, 25 bp, Homo sapiens
gatgaagcaccagagaacccacctg

SEQ ID NO: 2810 - DNA, 25 bp, Homo sapiens
atgaagcaccagagaacccacctgg

SEQ ID NO: 2811 - DNA, 25 bp, Homo sapiens
tgaagcaccagagaacccacctggg

SEQ ID NO: 2812 - DNA, 25 bp, Homo sapiens
gaagcaccagagaacccacctggga

SEQ ID NO: 2813 - DNA, 25 bp, Homo sapiens
aagcaccagagaacccacctgggaa

SEQ ID NO: 2814 - DNA, 25 bp, Homo sapiens
agcaccagagaacccacctgggaaa

SEQ ID NO: 2815 - DNA, 25 bp, Homo sapiens
gcaccagagaacccacctgggaaag

SEQ ID NO: 2816 - DNA, 25 bp, Homo sapiens
caccagagaacccacctgggaaaga

SEQ ID NO: 2817 - DNA, 25 bp, Homo sapiens
accagagaacccacctgggaaagag

SEQ ID NO: 2818 - DNA, 25 bp, Homo sapiens
ccagagaacccacctgggaaagagg

SEQ ID NO: 2819 - DNA, 25 bp, Homo sapiens
cagagaacccacctgggaaagaggc

SEQ ID NO: 2820 - DNA, 25 bp, Homo sapiens
agagaacccacctgggaaagaggcc

SEQ ID NO: 2821 - DNA, 25 bp, Homo sapiens
gagaacccacctgggaaagaggccc

SEQ ID NO: 2822 - DNA, 25 bp, Homo sapiens
agaacccacctgggaaagaggccct

SEQ ID NO: 2823 - DNA, 25 bp, Homo sapiens
gaacccacctgggaaagaggcccta

SEQ ID NO: 2824 - DNA, 25 bp, Homo sapiens
aacccacctgggaaagaggccctac

SEQ ID NO: 2825 - DNA, 25 bp, Homo sapiens
acccacctgggaaagaggccctacg

SEQ ID NO: 2826 - DNA, 25 bp, Homo sapiens
cccacctgggaaagaggccctacgt

SEQ ID NO: 2827 - DNA, 25 bp, Homo sapiens
ccacctgggaaagaggccctacgtg

SEQ ID NO: 2828 - DNA, 25 bp, Homo sapiens
cacctgggaaagaggccctacgtgt

SEQ ID NO: 2829 - DNA, 25 bp, Homo sapiens
acctgggaaagaggccctacgtgtg

SEQ ID NO: 2830 - DNA, 25 bp, Homo sapiens
cctgggaaagaggccctacgtgtgc

SEQ ID NO: 2831 - DNA, 25 bp, Homo sapiens
ctgggaaagaggccctacgtgtgca

SEQ ID NO: 2832 - DNA, 25 bp, Homo sapiens
tgggaaagaggccctacgtgtgcag

SEQ ID NO: 2833 - DNA, 25 bp, Homo sapiens
gggaaagaggccctacgtgtgcagc

SEQ ID NO: 2834 - DNA, 25 bp, Homo sapiens
ggaaagaggccctacgtgtgcagcg

SEQ ID NO: 2835 - DNA, 25 bp, Homo sapiens
gaaagaggccctacgtgtgcagcga

SEQ ID NO: 2836 - DNA, 25 bp, Homo sapiens
aaagaggccctacgtgtgcagcgag

SEQ ID NO: 2837 - DNA, 25 bp, Homo sapiens
aagaggccctacgtgtgcagcgagt

SEQ ID NO: 2838 - DNA, 25 bp, Homo sapiens
agaggccctacgtgtgcagcgagtg

SEQ ID NO: 2839 - DNA, 25 bp, Homo sapiens
gaggccctacgtgtgcagcgagtgc

SEQ ID NO: 2840 - DNA, 25 bp, Homo sapiens
aggccctacgtgtgcagcgagtgct

SEQ ID NO: 2841 - DNA, 25 bp, Homo sapiens
ggccctacgtgtgcagcgagtgctg

SEQ ID NO: 2842 - DNA, 25 bp, Homo sapiens
gccctacgtgtgcagcgagtgctgg

SEQ ID NO: 2843 - DNA, 25 bp, Homo sapiens
ccctacgtgtgcagcgagtgctgga

SEQ ID NO: 2844 - DNA, 25 bp, Homo sapiens
cctacgtgtgcagcgagtgctggaa

SEQ ID NO: 2845 - DNA, 25 bp, Homo sapiens
ctacgtgtgcagcgagtgctggaaa

SEQ ID NO: 2846 - DNA, 25 bp, Homo sapiens
tacgtgtgcagcgagtgctggaaaa

SEQ ID NO: 2847 - DNA, 25 bp, Homo sapiens
acgtgtgcagcgagtgctggaaaac

SEQ ID NO: 2848 - DNA, 25 bp, Homo sapiens
cgtgtgcagcgagtgctggaaaacc

SEQ ID NO: 2849 - DNA, 25 bp, Homo sapiens
gtgtgcagcgagtgctggaaaacct

SEQ ID NO: 2850 - DNA, 25 bp, Homo sapiens
tgtgcagcgagtgctggaaaacctt

SEQ ID NO: 2851 - DNA, 25 bp, Homo sapiens
gtgcagcgagtgctggaaaaccttc

SEQ ID NO: 2852 - DNA, 25 bp, Homo sapiens
tgcagcgagtgctggaaaaccttca

SEQ ID NO: 2853 - DNA, 25 bp, Homo sapiens
gcagcgagtgctggaaaaccttcag

SEQ ID NO: 2854 - DNA, 25 bp, Homo sapiens
cagcgagtgctggaaaaccttcagc

SEQ ID NO: 2855 - DNA, 25 bp, Homo sapiens
agcgagtgctggaaaaccttcagcc

SEQ ID NO: 2856 - DNA, 25 bp, Homo sapiens
gcgagtgctggaaaaccttcagcca

SEQ ID NO: 2857 - DNA, 25 bp, Homo sapiens
cgagtgctggaaaaccttcagccag

SEQ ID NO: 2858 - DNA, 25 bp, Homo sapiens
gagtgctggaaaaccttcagccaga

SEQ ID NO: 2859 - DNA, 25 bp, Homo sapiens
agtgctggaaaaccttcagccagag

SEQ ID NO: 2860 - DNA, 25 bp, Homo sapiens
gtgctggaaaaccttcagccagaga

SEQ ID NO: 2861 - DNA, 25 bp, Homo sapiens
tgctggaaaaccttcagccagagac

SEQ ID NO: 2862 - DNA, 25 bp, Homo sapiens
gctggaaaaccttcagccagagaca

SEQ ID NO: 2863 - DNA, 25 bp, Homo sapiens
ctggaaaaccttcagccagagacac

SEQ ID NO: 2864 - DNA, 25 bp, Homo sapiens
tggaaaaccttcagccagagacacc

SEQ ID NO: 2865 - DNA, 25 bp, Homo sapiens
ggaaaaccttcagccagagacacca

SEQ ID NO: 2866 - DNA, 25 bp, Homo sapiens
gaaaaccttcagccagagacaccac

SEQ ID NO: 2867 - DNA, 25 bp, Homo sapiens
aaaaccttcagccagagacaccacc

SEQ ID NO: 2868 - DNA, 25 bp, Homo sapiens
aaaccttcagccagagacaccacct

SEQ ID NO: 2869 - DNA, 25 bp, Homo sapiens
aaccttcagccagagacaccacctg

SEQ ID NO: 2870 - DNA, 25 bp, Homo sapiens
accttcagccagagacaccacctgg

SEQ ID NO: 2871 - DNA, 25 bp, Homo sapiens
ccttcagccagagacaccacctgga

SEQ ID NO: 2872 - DNA, 25 bp, Homo sapiens
cttcagccagagacaccacctggag

SEQ ID NO: 2873 - DNA, 25 bp, Homo sapiens
ttcagccagagacaccacctggagg

SEQ ID NO: 2874 - DNA, 25 bp, Homo sapiens
tcagccagagacaccacctggaggt

SEQ ID NO: 2875 - DNA, 25 bp, Homo sapiens
cagccagagacaccacctggaggtg

SEQ ID NO: 2876 - DNA, 25 bp, Homo sapiens
agccagagacaccacctggaggtgc

SEQ ID NO: 2877 - DNA, 25 bp, Homo sapiens
gccagagacaccacctggaggtgca

SEQ ID NO: 2878 - DNA, 25 bp, Homo sapiens
ccagagacaccacctggaggtgcac

SEQ ID NO: 2879 - DNA, 25 bp, Homo sapiens
cagagacaccacctggaggtgcacc

SEQ ID NO: 2880 - DNA, 25 bp, Homo sapiens
agagacaccacctggaggtgcacca

SEQ ID NO: 2881 - DNA, 25 bp, Homo sapiens
gagacaccacctggaggtgcaccag

SEQ ID NO: 2882 - DNA, 25 bp, Homo sapiens
agacaccacctggaggtgcaccagc

SEQ ID NO: 2883 - DNA, 25 bp, Homo sapiens
gacaccacctggaggtgcaccagcg

SEQ ID NO: 2884 - DNA, 25 bp, Homo sapiens
acaccacctggaggtgcaccagcgc

SEQ ID NO: 2885 - DNA, 25 bp, Homo sapiens
caccacctggaggtgcaccagcgca

SEQ ID NO: 2886 - DNA, 25 bp, Homo sapiens
accacctggaggtgcaccagcgcag

SEQ ID NO: 2887 - DNA, 25 bp, Homo sapiens
ccacctggaggtgcaccagcgcagc

SEQ ID NO: 2888 - DNA, 25 bp, Homo sapiens
cacctggaggtgcaccagcgcagcc

SEQ ID NO: 2889 - DNA, 25 bp, Homo sapiens
acctggaggtgcaccagcgcagcca

SEQ ID NO: 2890 - DNA, 25 bp, Homo sapiens
cctggaggtgcaccagcgcagccac

SEQ ID NO: 2891 - DNA, 25 bp, Homo sapiens
ctggaggtgcaccagcgcagccaca

SEQ ID NO: 2892 - DNA, 25 bp, Homo sapiens
tggaggtgcaccagcgcagccacac

SEQ ID NO: 2893 - DNA, 25 bp, Homo sapiens
ggaggtgcaccagcgcagccacact

SEQ ID NO: 2894 - DNA, 25 bp, Homo sapiens
gaggtgcaccagcgcagccacactg

SEQ ID NO: 2895 - DNA, 25 bp, Homo sapiens
aggtgcaccagcgcagccacactgg

SEQ ID NO: 2896 - DNA, 25 bp, Homo sapiens
ggtgcaccagcgcagccacactggg

SEQ ID NO: 2897 - DNA, 25 bp, Homo sapiens
gtgcaccagcgcagccacactgggg

SEQ ID NO: 2898 - DNA, 25 bp, Homo sapiens
tgcaccagcgcagccacactgggga

SEQ ID NO: 2899 - DNA, 25 bp, Homo sapiens
gcaccagcgcagccacactggggag

SEQ ID NO: 2900 - DNA, 25 bp, Homo sapiens
caccagcgcagccacactggggaga

SEQ ID NO: 2901 - DNA, 25 bp, Homo sapiens
accagcgcagccacactggggagaa

SEQ ID NO: 2902 - DNA, 25 bp, Homo sapiens
ccagcgcagccacactggggagaag

SEQ ID NO: 2903 - DNA, 25 bp, Homo sapiens
cagcgcagccacactggggagaagc

SEQ ID NO: 2904 - DNA, 25 bp, Homo sapiens
agcgcagccacactggggagaagcc

SEQ ID NO: 2905 - DNA, 25 bp, Homo sapiens
gcgcagccacactggggagaagccc

SEQ ID NO: 2906 - DNA, 25 bp, Homo sapiens
cgcagccacactggggagaagcccc

SEQ ID NO: 2907 - DNA, 25 bp, Homo sapiens
gcagccacactggggagaagcccca

SEQ ID NO: 2908 - DNA, 25 bp, Homo sapiens
cagccacactggggagaagccccac

SEQ ID NO: 2909 - DNA, 25 bp, Homo sapiens
agccacactggggagaagccccaca

SEQ ID NO: 2910 - DNA, 25 bp, Homo sapiens
gccacactggggagaagccccacaa

SEQ ID NO: 2911 - DNA, 25 bp, Homo sapiens
ccacactggggagaagccccacaag

SEQ ID NO: 2912 - DNA, 25 bp, Homo sapiens
cacactggggagaagccccacaagt

SEQ ID NO: 2913 - DNA, 25 bp, Homo sapiens
acactggggagaagccccacaagtg

SEQ ID NO: 2914 - DNA, 25 bp, Homo sapiens
cactggggagaagccccacaagtgc

SEQ ID NO: 2915 - DNA, 25 bp, Homo sapiens
actggggagaagccccacaagtgcg

SEQ ID NO: 2916 - DNA, 25 bp, Homo sapiens
ctggggagaagccccacaagtgcgg

SEQ ID NO: 2917 - DNA, 25 bp, Homo sapiens
tggggagaagccccacaagtgcggg

SEQ ID NO: 2918 - DNA, 25 bp, Homo sapiens
ggggagaagccccacaagtgcgggg

SEQ ID NO: 2919 - DNA, 25 bp, Homo sapiens
gggagaagccccacaagtgcgggga

SEQ ID NO: 2920 - DNA, 25 bp, Homo sapiens
ggagaagccccacaagtgcggggac

SEQ ID NO: 2921 - DNA, 25 bp, Homo sapiens
gagaagccccacaagtgcggggact

SEQ ID NO: 2922 - DNA, 25 bp, Homo sapiens
agaagccccacaagtgcggggactg

SEQ ID NO: 2923 - DNA, 25 bp, Homo sapiens
gaagccccacaagtgcggggactgc

SEQ ID NO: 2924 - DNA, 25 bp, Homo sapiens
aagccccacaagtgcggggactgct

SEQ ID NO: 2925 - DNA, 25 bp, Homo sapiens
agccccacaagtgcggggactgctg

SEQ ID NO: 2926 - DNA, 25 bp, Homo sapiens
gccccacaagtgcggggactgctgg

SEQ ID NO: 2927 - DNA, 25 bp, Homo sapiens
ccccacaagtgcggggactgctgga

SEQ ID NO: 2928 - DNA, 25 bp, Homo sapiens
cccacaagtgcggggactgctggaa

SEQ ID NO: 2929 - DNA, 25 bp, Homo sapiens
ccacaagtgcggggactgctggaag

SEQ ID NO: 2930 - DNA, 25 bp, Homo sapiens
cacaagtgcggggactgctggaaga

SEQ ID NO: 2931 - DNA, 25 bp, Homo sapiens
acaagtgcggggactgctggaagag

SEQ ID NO: 2932 - DNA, 25 bp, Homo sapiens
caagtgcggggactgctggaagagc

SEQ ID NO: 2933 - DNA, 25 bp, Homo sapiens
aagtgcggggactgctggaagagct

SEQ ID NO: 2934 - DNA, 25 bp, Homo sapiens
agtgcggggactgctggaagagctt

SEQ ID NO: 2935 - DNA, 25 bp, Homo sapiens
gtgcggggactgctggaagagcttc

SEQ ID NO: 2936 - DNA, 25 bp, Homo sapiens
tgcggggactgctggaagagcttca

SEQ ID NO: 2937 - DNA, 25 bp, Homo sapiens
gcggggactgctggaagagcttcag

SEQ ID NO: 2938 - DNA, 25 bp, Homo sapiens
cggggactgctggaagagcttcagc

SEQ ID NO: 2939 - DNA, 25 bp, Homo sapiens
ggggactgctggaagagcttcagcc

SEQ ID NO: 2940 - DNA, 25 bp, Homo sapiens
gggactgctggaagagcttcagccg

SEQ ID NO: 2941 - DNA, 25 bp, Homo sapiens
ggactgctggaagagcttcagccgc

SEQ ID NO: 2942 - DNA, 25 bp, Homo sapiens
gactgctggaagagcttcagccgca

SEQ ID NO: 2943 - DNA, 25 bp, Homo sapiens
actgctggaagagcttcagccgcag

SEQ ID NO: 2944 - DNA, 25 bp, Homo sapiens
ctgctggaagagcttcagccgcagg

SEQ ID NO: 2945 - DNA, 25 bp, Homo sapiens
tgctggaagagcttcagccgcaggc

SEQ ID NO: 2946 - DNA, 25 bp, Homo sapiens
gctggaagagcttcagccgcaggca

SEQ ID NO: 2947 - DNA, 25 bp, Homo sapiens
ctggaagagcttcagccgcaggcag

SEQ ID NO: 2948 - DNA, 25 bp, Homo sapiens
tggaagagcttcagccgcaggcagc

SEQ ID NO: 2949 - DNA, 25 bp, Homo sapiens
ggaagagcttcagccgcaggcagca

SEQ ID NO: 2950 - DNA, 25 bp, Homo sapiens
gaagagcttcagccgcaggcagcac

SEQ ID NO: 2951 - DNA, 25 bp, Homo sapiens
aagagcttcagccgcaggcagcacc

SEQ ID NO: 2952 - DNA, 25 bp, Homo sapiens
agagcttcagccgcaggcagcacct

SEQ ID NO: 2953 - DNA, 25 bp, Homo sapiens
gagcttcagccgcaggcagcacctg

SEQ ID NO: 2954 - DNA, 25 bp, Homo sapiens
agcttcagccgcaggcagcacctgc

SEQ ID NO: 2955 - DNA, 25 bp, Homo sapiens
gcttcagccgcaggcagcacctgca

SEQ ID NO: 2956 - DNA, 25 bp, Homo sapiens
cttcagccgcaggcagcacctgcag

SEQ ID NO: 2957 - DNA, 25 bp, Homo sapiens
ttcagccgcaggcagcacctgcagg

SEQ ID NO: 2958 - DNA, 25 bp, Homo sapiens
tcagccgcaggcagcacctgcaggt

SEQ ID NO: 2959 - DNA, 25 bp, Homo sapiens
cagccgcaggcagcacctgcaggtg

SEQ ID NO: 2960 - DNA, 25 bp, Homo sapiens
agccgcaggcagcacctgcaggtgc

SEQ ID NO: 2961 - DNA, 25 bp, Homo sapiens
gccgcaggcagcacctgcaggtgca

SEQ ID NO: 2962 - DNA, 25 bp, Homo sapiens
ccgcaggcagcacctgcaggtgcac

SEQ ID NO: 2963 - DNA, 25 bp, Homo sapiens
cgcaggcagcacctgcaggtgcacc

SEQ ID NO: 2964 - DNA, 25 bp, Homo sapiens
gcaggcagcacctgcaggtgcaccg

SEQ ID NO: 2965 - DNA, 25 bp, Homo sapiens
caggcagcacctgcaggtgcaccgg

SEQ ID NO: 2966 - DNA, 25 bp, Homo sapiens
aggcagcacctgcaggtgcaccgga

SEQ ID NO: 2967 - DNA, 25 bp, Homo sapiens
ggcagcacctgcaggtgcaccggag

SEQ ID NO: 2968 - DNA, 25 bp, Homo sapiens
gcagcacctgcaggtgcaccggagg

SEQ ID NO: 2969 - DNA, 25 bp, Homo sapiens
cagcacctgcaggtgcaccggagga

SEQ ID NO: 2970 - DNA, 25 bp, Homo sapiens
agcacctgcaggtgcaccggaggac

SEQ ID NO: 2971 - DNA, 25 bp, Homo sapiens
gcacctgcaggtgcaccggaggacg

SEQ ID NO: 2972 - DNA, 25 bp, Homo sapiens
cacctgcaggtgcaccggaggacgc

SEQ ID NO: 2973 - DNA, 25 bp, Homo sapiens
acctgcaggtgcaccggaggacgca

SEQ ID NO: 2974 - DNA, 25 bp, Homo sapiens
cctgcaggtgcaccggaggacgcac

SEQ ID NO: 2975 - DNA, 25 bp, Homo sapiens
ctgcaggtgcaccggaggacgcaca

SEQ ID NO: 2976 - DNA, 25 bp, Homo sapiens
tgcaggtgcaccggaggacgcacac

SEQ ID NO: 2977 - DNA, 25 bp, Homo sapiens
gcaggtgcaccggaggacgcacacc

SEQ ID NO: 2978 - DNA, 25 bp, Homo sapiens
caggtgcaccggaggacgcacaccg

SEQ ID NO: 2979 - DNA, 25 bp, Homo sapiens
aggtgcaccggaggacgcacaccgg

SEQ ID NO: 2980 - DNA, 25 bp, Homo sapiens
ggtgcaccggaggacgcacaccggg

SEQ ID NO: 2981 - DNA, 25 bp, Homo sapiens
gtgcaccggaggacgcacaccgggg

SEQ ID NO: 2982 - DNA, 25 bp, Homo sapiens
tgcaccggaggacgcacaccgggga

SEQ ID NO: 2983 - DNA, 25 bp, Homo sapiens
gcaccggaggacgcacaccggggag

SEQ ID NO: 2984 - DNA, 25 bp, Homo sapiens
caccggaggacgcacaccggggaga

SEQ ID NO: 2985 - DNA, 25 bp, Homo sapiens
accggaggacgcacaccggggagaa

SEQ ID NO: 2986 - DNA, 25 bp, Homo sapiens
ccggaggacgcacaccggggagaag

SEQ ID NO: 2987 - DNA, 25 bp, Homo sapiens
cggaggacgcacaccggggagaagc

SEQ ID NO: 2988 - DNA, 25 bp, Homo sapiens
ggaggacgcacaccggggagaagcc

SEQ ID NO: 2989 - DNA, 25 bp, Homo sapiens
gaggacgcacaccggggagaagccc

SEQ ID NO: 2990 - DNA, 25 bp, Homo sapiens
aggacgcacaccggggagaagccct

SEQ ID NO: 2991 - DNA, 25 bp, Homo sapiens
ggacgcacaccggggagaagcccta

SEQ ID NO: 2992 - DNA, 25 bp, Homo sapiens
gacgcacaccggggagaagccctac

SEQ ID NO: 2993 - DNA, 25 bp, Homo sapiens
acgcacaccggggagaagccctaca

SEQ ID NO: 2994 - DNA, 25 bp, Homo sapiens
cgcacaccggggagaagccctacac

SEQ ID NO: 2995 - DNA, 25 bp, Homo sapiens
gcacaccggggagaagccctacacc

SEQ ID NO: 2996 - DNA, 25 bp, Homo sapiens
cacaccggggagaagccctacacct

SEQ ID NO: 2997 - DNA, 25 bp, Homo sapiens
acaccggggagaagccctacacctg

SEQ ID NO: 2998 - DNA, 25 bp, Homo sapiens
caccggggagaagccctacacctgc

SEQ ID NO: 2999 - DNA, 25 bp, Homo sapiens
accggggagaagccctacacctgcg

SEQ ID NO: 3000 - DNA, 25 bp, Homo sapiens
ccggggagaagccctacacctgcga

SEQ ID NO: 3001 - DNA, 25 bp, Homo sapiens
cggggagaagccctacacctgcgag

SEQ ID NO: 3002 - DNA, 25 bp, Homo sapiens
ggggagaagccctacacctgcgagt

SEQ ID NO: 3003 - DNA, 25 bp, Homo sapiens
gggagaagccctacacctgcgagtg

SEQ ID NO: 3004 - DNA, 25 bp, Homo sapiens
ggagaagccctacacctgcgagtgt

SEQ ID NO: 3005 - DNA, 25 bp, Homo sapiens
gagaagccctacacctgcgagtgtg

SEQ ID NO: 3006 - DNA, 25 bp, Homo sapiens
agaagccctacacctgcgagtgtgg

SEQ ID NO: 3007 - DNA, 25 bp, Homo sapiens
gaagccctacacctgcgagtgtggc

SEQ ID NO: 3008 - DNA, 25 bp, Homo sapiens
aagccctacacctgcgagtgtggca

SEQ ID NO: 3009 - DNA, 25 bp, Homo sapiens
agccctacacctgcgagtgtggcaa

SEQ ID NO: 3010 - DNA, 25 bp, Homo sapiens
gccctacacctgcgagtgtggcaag

SEQ ID NO: 3011 - DNA, 25 bp, Homo sapiens
ccctacacctgcgagtgtggcaaga

SEQ ID NO: 3012 - DNA, 25 bp, Homo sapiens
cctacacctgcgagtgtggcaagag

SEQ ID NO: 3013 - DNA, 25 bp, Homo sapiens
ctacacctgcgagtgtggcaagagc

SEQ ID NO: 3014 - DNA, 25 bp, Homo sapiens
tacacctgcgagtgtggcaagagct

SEQ ID NO: 3015 - DNA, 25 bp, Homo sapiens
acacctgcgagtgtggcaagagctt

SEQ ID NO: 3016 - DNA, 25 bp, Homo sapiens
cacctgcgagtgtggcaagagcttc

SEQ ID NO: 3017 - DNA, 25 bp, Homo sapiens
acctgcgagtgtggcaagagcttca

SEQ ID NO: 3018 - DNA, 25 bp, Homo sapiens
cctgcgagtgtggcaagagcttcag

SEQ ID NO: 3019 - DNA, 25 bp, Homo sapiens
ctgcgagtgtggcaagagcttcagc

SEQ ID NO: 3020 - DNA, 25 bp, Homo sapiens
tgcgagtgtggcaagagcttcagca

SEQ ID NO: 3021 - DNA, 25 bp, Homo sapiens
gcgagtgtggcaagagcttcagcag

SEQ ID NO: 3022 - DNA, 25 bp, Homo sapiens
cgagtgtggcaagagcttcagcagg

SEQ ID NO: 3023 - DNA, 25 bp, Homo sapiens
gagtgtggcaagagcttcagcagga

SEQ ID NO: 3024 - DNA, 25 bp, Homo sapiens
agtgtggcaagagcttcagcaggaa

SEQ ID NO: 3025 - DNA, 25 bp, Homo sapiens
gtgtggcaagagcttcagcaggaat

SEQ ID NO: 3026 - DNA, 25 bp, Homo sapiens
tgtggcaagagcttcagcaggaatg

SEQ ID NO: 3027 - DNA, 1329 bp, Homo sapiens
gttgtcaaggattcagagcagatgtgatctgcgctaggtggcatctcctctcacggatgcctcgatctcggggtttccagaagaaaagatcaagggagaattatcaagaatagattatttttctgaatagttaaacctttgatggccataaccttgacccttcagactgcagagatgcaggaaggacttctggcagtgaaggtaaaggaggaagaggaggaacattcctgtgggccagaatcaggcctgtcaagaaataaccctcataccagagagatctttcgtagacgcttcaggcagttctgctatcaggagtcccctgggccccgggaggctcttcaaagactccaggagctctgccatcagtggctgagaccagagatgcacaccaaggagcagatcctagagctgctggtgctggagcagttcctgactatcctgcctgaggagctccaggcctgggtcagacagcaccgtcctgtgagtggagaggaggcagtgactgtgctggaggatttggagagagagctggatgacccaggagagcaggtcctgagccatgctcatgaacaggaagagtttgtaaaggagaaggcaactccaggagcagctcaggagtcatcaaatgaccaattccaaaccttggaagagcagcttgggtataatttgcgagaggtgtgcccagttcaagagattgatggcaaggctgggacttggaatgtggagttagccccaaagagggagatttctcaggaagtgaaatctcttatacaagttcttggaaaacagaatggtaatattactcagattcctgagtatggagatacctgtgaccgtgagggcagattggaaaagcaaagggtgagctcttcagtggagagaccctatatctgtagtgaatgtggaaaaagcttcacccagaattccatccttatcgagcaccagagaacacacacaggtgagaagccttatgaatgtgatgagtgtgggcgggccttcagccagaggtcaggcctattccagcaccagagactccacactggggagaagcgctaccagtgcagtgtttgtggcaaagccttcagccagaatgccgggcttttccatcacctcagaattcacactggggagaagccttaccagtgcaatcagtgcaataagagttttagtcgacgttcagtcctcattaagcatcagagaattcacactggagagagaccttatgaatgtgaagaatgtggcaagaacttcatttaccattgcaacctaatccagcatcggaaagtccacccagtggctgaatcaagctagctccttggaacaggtagg

SEQ ID NO: 3028 - DNA, 1170 bp, Homo sapiens
atggccataaccttgacccttcagactgcagagatgcaggaaggacttctggcagtgaaggtaaaggaggaagaggaggaacattcctgtgggccagaatcaggcctgtcaagaaataaccctcataccagagagatctttcgtagacgcttcaggcagttctgctatcaggagtcccctgggccccgggaggctcttcaaagactccaggagctctgccatcagtggctgagaccagagatgcacaccaaggagcagatcctagagctgctggtgctggagcagttcctgactatcctgcctgaggagctccaggcctgggtcagacagcaccgtcctgtgagtggagaggaggcagtgactgtgctggaggatttggagagagagctggatgacccaggagagcaggtcctgagccatgctcatgaacaggaagagtttgtaaaggagaaggcaactccaggagcagctcaggagtcatcaaatgaccaattccaaaccttggaagagcagcttgggtataatttgcgagaggtgtgcccagttcaagagattgatggcaaggctgggacttggaatgtggagttagccccaaagagggagatttctcaggaagtgaaatctcttatacaagttcttggaaaacagaatggtaatattactcagattcctgagtatggagatacctgtgaccgtgagggcagattggaaaagcaaagggtgagctcttcagtggagagaccctatatctgtagtgaatgtggaaaaagcttcacccagaattccatccttatcgagcaccagagaacacacacaggtgagaagccttatgaatgtgatgagtgtgggcgggccttcagccagaggtcaggcctattccagcaccagagactccacactggggagaagcgctaccagtgcagtgtttgtggcaaagccttcagccagaatgccgggcttttccatcacctcagaattcacactggggagaagccttaccagtgcaatcagtgcaataagagttttagtcgacgttcagtcctcattaagcatcagagaattcacactggagagagaccttatgaatgtgaagaatgtggcaagaacttcatttaccattgcaacctaatccagcatcggaaagtccacccagtggctgaatcaagctag

SEQ ID NO: 3029 - protein, 389 aa, Homo sapiens
MAITLTLQTAEMQEGLLAVKVKEEEEEHSCGPESGLSRNNPHTREIFRRRFRQFCYQESPGPREALQRLQELCHQWLRPEMHTKEQILELLVLEQFLTILPEELQAWVRQHRPVSGEEAVTVLEDLERELDDPGEQVLSHAHEQEEFVKEKATPGAAQESSNDQFQTLEEQLGYNLREVCPVQEIDGKAGTWNVELAPKREISQEVKSLIQVLGKQNGNITQIPEYGDTCDREGRLEKQRVSSSVERPYICSECGKSFTQNSILIEHQRTHTGEKPYECDECGRAFSQRSGLFQHQRLHTGEKRYQCSVCGKAFSQNAGLFHHLRIHTGEKPYQCNQCNKSFSRRSVLIKHQRIHTGERPYECEECGKNFIYHCNLIQHRKVHPVAESS

SEQ ID NO: 3030 - DNA, 485 bp, Homo sapiens
atctcggggtttccagaagaaaagatcaagggagaattatcaagaatagattatttttctgaatagttaaacctttgatggccataaccttgacccttcagactgcagagatgcaggaaggacttctggcagtgaaggtaaaggaggaagaggaggaacattcctgtgggccagaatcaggcctgtcaagaaataaccctcataccagagagatctttcgtagacgcttcaggcagttctgctatcaggagtcccctgggccccgggaggctcttcaaagactccaggagctctgccatcagtggctgagaccagagatgcacaccaaggagcagatcctagagctgctggtgctggagcagttcctgactatcctgcctgaggagctccaggcctgggtcagacagcaccgtcctgtgagtggagaggaggcagtgactgtgctggaggatttggagagagagctggatgacccaggagagcag

SEQ ID NO: 3031 - DNA, 77 bp, Homo sapiens
atctcggggtttccagaagaaaagatcaagggagaattatcaagaatagattatttttctgaatagttaaacctttg

SEQ ID NO: 3032 - DNA, 408 bp, Homo sapiens
atggccataaccttgacccttcagactgcagagatgcaggaaggacttctggcagtgaaggtaaaggaggaagaggaggaacattcctgtgggccagaatcaggcctgtcaagaaataaccctcataccagagagatctttcgtagacgcttcaggcagttctgctatcaggagtcccctgggccccgggaggctcttcaaagactccaggagctctgccatcagtggctgagaccagagatgcacaccaaggagcagatcctagagctgctggtgctggagcagttcctgactatcctgcctgaggagctccaggcctgggtcagacagcaccgtcctgtgagtggagaggaggcagtgactgtgctggaggatttggagagagagctggatgacccaggagagcag

SEQ ID NO: 3033 - protein, 136 aa, Homo sapiens
MAITLTLQTAEMQEGLLAVKVKEEEEEHSCGPESGLSRNNPHTREIFRRRFRQFCYQESPGPREALQRLQELCHQWLRPEMHTKEQILELLVLEQFLTILPEELQAWVRQHRPVSGEEAVTVLEDLERELDDPGEQ

SEQ ID NO: 3034 - DNA, 235 bp, Homo sapiens
cgggcttttccatcacctcagaattcacactggggagaagccttaccagtgcaatcagtgcaataagagttttagtcgacgttcagtcctcattaagcatcagagaattcacactggagagagaccttatgaatgtgaagaatgtggcaagaacttcatttaccattgcaacctaatccagcatcggaaagtccacccagtggctgaatcaagctagctccttggaacaggtagg

SEQ ID NO: 3035 - DNA, 217 bp, Homo sapiens
cgggcttttccatcacctcagaattcacactggggagaagccttaccagtgcaatcagtgcaataagagttttagtcgacgttcagtcctcattaagcatcagagaattcacactggagagagaccttatgaatgtgaagaatgtggcaagaacttcatttaccattgcaacctaatccagcatcggaaagtccacccagtggctgaatcaagctag

SEQ ID NO: 3036 - DNA, 18 bp, Homo sapiens
ctccttggaacaggtagg

SEQ ID NO: 3037 - protein, 71 aa, Homo sapiens
GLFHHLRIHTGEKPYQCNQCNKSFSRRSVLIKHQRIHTGERPYECEECGKNFIYHCNLIQHRKVHPVAESS

SEQ ID NO: 3038 - DNA, 64 bp, Homo sapiens
gttgtcaaggattcagagcagatgtgatctgcgctaggtggcatctcctctcacggatgcctcg

SEQ ID NO: 3039 - DNA, 485 bp, Homo sapiens; identical to SEQ ID NO: 3030

SEQ ID NO: 3040 - DNA, 148 bp, Homo sapiens
gtcctgagccatgctcatgaacaggaagagtttgtaaaggagaaggcaactccaggagcagctcaggagtcatcaaatgaccaattccaaaccttggaagagcagcttgggtataatttgcgagaggtgtgcccagttcaagagattg

SEQ ID NO: 3041 - DNA, 632 bp, Homo sapiens
atggcaaggctgggacttggaatgtggagttagccccaaagagggagatttctcaggaagtgaaatctcttatacaagttcttggaaaacagaatggtaatattactcagattcctgagtatggagatacctgtgaccgtgagggcagattggaaaagcaaagggtgagctcttcagtggagagaccctatatctgtagtgaatgtggaaaaagcttcacccagaattccatccttatcgagcaccagagaacacacacaggtgagaagccttatgaatgtgatgagtgtgggcgggccttcagccagaggtcaggcctattccagcaccagagactccacactggggagaagcgctaccagtgcagtgtttgtggcaaagccttcagccagaatgccgggcttttccatcacctcagaattcacactggggagaagccttaccagtgcaatcagtgcaataagagttttagtcgacgttcagtcctcattaagcatcagagaattcacactggagagagaccttatgaatgtgaagaatgtggcaagaacttcatttaccattgcaacctaatccagcatcggaaagtccacccagtggctgaatcaagctagctccttggaacaggtagg

SEQ ID NO: 3042 - DNA, 500 bp, Homo sapiens
aaaacactatgttggccgttattatattgccgcgtggaagacaatgtgtcacctagtatctcacttaagactacagacgggattcagagtgacgaccacagaggtgtggaaacctccggccttcctagaaggaacacagccggaaccgctgtttcgcggagagcgggccgcggtgacgcatttccggcctttgtagtttatcattctttgggctgcggttgtcaaggattcagagcagatgtgatctgcgctaggtggcatctcctctcacggatgcctcggtgagcttcggagtcgggctaccgctgaggggcttcggaagggccagtctgtgcactgcgacctggactgggtgtggggatttggcggcagggtcttcttggccagagatgggccgggcaggtgaagggcagaggaggttgctccgcagcctggaagggctttgttaaccaaaagtcagcgtcgttgcccctacccctttcccccaccctatgtctgtt

SEQ ID NO: 3043 - DNA, 500 bp, Homo sapiens
tgtctagatctcggggtttccagaagaaaagatcaagggagaattatcaagaatagattatttttctgaatagttaaacctttgatggccataaccttgacccttcagactgcagagatgcaggaaggacttctggcagtgaaggtaaaggaggaagaggaggaacattcctgtgggccagaatcaggcctgtcaagaaataaccctcataccagagagatctttcgtagacgcttcaggcagttctgctatcaggagtcccctgggccccgggaggctcttcaaagactccaggagctctgccatcagtggctgagaccagagatgcacaccaaggagcagatcctagagctgctggtgctggagcagttcctgactatcctgcctgaggagctccaggcctgggtcagacagcaccgtcctgtgagtggagaggaggcagtgactgtgctggaggatttggagagagagctggatgacccaggagagcaggtgagaag

SEQ ID NO: 3044 - DNA, 500 bp, Homo sapiens
gaggaggattttttttttatgccagacttgatcttctgtaggcttttagtctctctgcctctgttttttctttgccagcttcttggtccttcttttctatccagcggccctgaggaggcctccttgccatgttctctctgatattgggttcccaactgtccttgatttccaccaggtcctgagccatgctcatgaacaggaagagtttgtaaaggagaaggcaactccaggagcagctcaggagtcatcaaatgaccaattccaaaccttggaagagcaacttgggtataatttgcgagaggtgtgcccagttcaagagattggtgaggatcaggatttcctcagacagcctacctcattccctgaatatttatcaattcaacccatttatttagtgtctgctgtatgccaggcactgtgccaggtaccagggatacagtgataaacaaggcagatgtggtccccactctcacgaagtttacagtctagtgggagaggca

SEQ ID NO: 3045 - DNA, 500 bp, Homo sapiens
tcttatacaagttcttggaaaacagaatggtaatattactcagattcctgagtatggagatacctgtgaccgtgagggcagattggaaaagcaaagggtgagctcttcagtggagagaccctatatctgtagtgaatgtggaaaaagcttcacccagaattccatccttatcgagcaccagagaacacacacaggtgagaagccttatgaatgtgatgagtgtgggcgggccttcagccagaggtcaggcctattccagcaccagagactccacactggggagaagcgctaccagtgcagtgtttgtggcaaagccttcagccagaatgccgggcttttccatcacctcagaattcacactggggagaagccttaccagtgcaatcagtgcaataagagttttagtcgacgttcagtcctcattaagcatcagagaattcacactggagagagaccttatgaatgtgaagaatgtggcaagaacttcatttaccattgca

SEQ ID NO: 3046 - DNA, 1000 bp, Homo sapiens
gaagtcagagcaggaacccactggaaggagccaattctggacacagtagactggcaggaaccaatgccagacacagtagcaatgaggttattcattgcccgaaatccagatcttggtttctatataccatttttcactgatgtactgtagcttcatgaagcaatggtgattctaggtttagggtaggaatagtataaaatgggactgaaatatcttttgtgagaaagtgaagtgcacaaaaactgttgggaacttatcaaaggacatagaaacctgtttgtggccgggtgcggtggctcacttctgtaatcccagccctttcggaggccgagggagcggatcacttgagggacaggagttcaagaccagcctcactaaggcatagtggtgtgttcttgtaatcccagatactcaggaggccgagacaggaggatcacttgaacccggaatgcggaggttgcagtgagctgagatcgcatccactgcactccagcctggagactttgtcaaaaaaagaaaagagagggagcagtgtgaaagggctccaactgaccaaattttaaataatttgagcatcaacataataataacagtaattatttgtaaaggaatccatgagttcatcgtgataaaatgagacggcagggaaaagaaagggtattctttgcaggaaatggcaactaataaatgtagaaatgtgcttcagtttcctcacctgttaaatggagataattgtacctaactcacagggttgttatgcggggtaatgaattaatacgtgttaaaacactatgttggccgttattatattgccgcgtggaagacaatgtgtcacctagtatctcacttaagactacagacgggattcagagtgacgaccacagaggtgtggaaacctccggccttcctagaaggaacacagccggaaccgctgtttcgcggagagcgggccgcggtgacgcatttccggcctttgtagtttatcattctttgggctgcg

SEQ ID NO: 3047 - DNA, 17 bp, Homo sapiens
atctcggggtttccaga

SEQ ID NO: 3048 - DNA, 17 bp, Homo sapiens
tctcggggtttccagaa

SEQ ID NO: 3049 - DNA, 17 bp, Homo sapiens
ctcggggtttccagaag

SEQ ID NO: 3050 - DNA, 17 bp, Homo sapiens
tcggggtttccagaaga

SEQ ID NO: 3051 - DNA, 17 bp, Homo sapiens
cggggtttccagaagaa

SEQ ID NO: 3052 - DNA, 17 bp, Homo sapiens
ggggtttccagaagaaa

SEQ ID NO: 3053 - DNA, 17 bp, Homo sapiens
gggtttccagaagaaaa

SEQ ID NO: 3054 - DNA, 17 bp, Homo sapiens
ggtttccagaagaaaag

SEQ ID NO: 3055 - DNA, 17 bp, Homo sapiens
gtttccagaagaaaaga

SEQ ID NO: 3056 - DNA, 17 bp, Homo sapiens
tttccagaagaaaagat

SEQ ID NO: 3057 - DNA, 17 bp, Homo sapiens
ttccagaagaaaagatc

SEQ ID NO: 3058 - DNA, 17 bp, Homo sapiens
tccagaagaaaagatca

SEQ ID NO: 3059 - DNA, 17 bp, Homo sapiens
ccagaagaaaagatcaa

SEQ ID NO: 3060 - DNA, 17 bp, Homo sapiens
cagaagaaaagatcaag

SEQ ID NO: 3061 - DNA, 17 bp, Homo sapiens
agaagaaaagatcaagg

SEQ ID NO: 3062 - DNA, 17 bp, Homo sapiens
gaagaaaagatcaaggg

SEQ ID NO: 3063 - DNA, 17 bp, Homo sapiens
aagaaaagatcaaggga

SEQ ID NO: 3064 - DNA, 17 bp, Homo sapiens
agaaaagatcaagggag

SEQ ID NO: 3065 - DNA, 17 bp, Homo sapiens
gaaaagatcaagggaga

SEQ ID NO: 3066 - DNA, 17 bp, Homo sapiens
aaaagatcaagggagaa

SEQ ID NO: 3067 - DNA, 17 bp, Homo sapiens
aaagatcaagggagaat

SEQ ID NO: 3068 - DNA, 17 bp, Homo sapiens
aagatcaagggagaatt

SEQ ID NO: 3069 - DNA, 17 bp, Homo sapiens
agatcaagggagaatta

SEQ ID NO: 3070 - DNA, 17 bp, Homo sapiens
gatcaagggagaattat

SEQ ID NO: 3071 - DNA, 17 bp, Homo sapiens
atcaagggagaattatc

SEQ ID NO: 3072 - DNA, 17 bp, Homo sapiens
tcaagggagaattatca

SEQ ID NO: 3073 - DNA, 17 bp, Homo sapiens
caagggagaattatcaa

SEQ ID NO: 3074 - DNA, 17 bp, Homo sapiens
aagggagaattatcaag

SEQ ID NO: 3075 - DNA, 17 bp, Homo sapiens
agggagaattatcaaga

SEQ ID NO: 3076 - DNA, 17 bp, Homo sapiens
gggagaattatcaagaa

SEQ ID NO: 3077 - DNA, 17 bp, Homo sapiens
ggagaattatcaagaat

SEQ ID NO: 3078 - DNA, 17 bp, Homo sapiens
gagaattatcaagaata

SEQ ID NO: 3079 - DNA, 17 bp, Homo sapiens
agaattatcaagaatag

SEQ ID NO: 3080 - DNA, 17 bp, Homo sapiens
gaattatcaagaataga

SEQ ID NO: 3081 - DNA, 17 bp, Homo sapiens
aattatcaagaatagat

SEQ ID NO: 3082 - DNA, 17 bp, Homo sapiens
attatcaagaatagatt

SEQ ID NO: 3083 - DNA, 17 bp, Homo sapiens
ttatcaagaatagatta

SEQ ID NO: 3084 - DNA, 17 bp, Homo sapiens
tatcaagaatagattat

SEQ ID NO: 3085 - DNA, 17 bp, Homo sapiens
atcaagaatagattatt

SEQ ID NO: 3086 - DNA, 17 bp, Homo sapiens
tcaagaatagattattt

SEQ ID NO: 3087 - DNA, 17 bp, Homo sapiens
caagaatagattatttt

SEQ ID NO: 3088 - DNA, 17 bp, Homo sapiens
aagaatagattattttt

SEQ ID NO: 3089 - DNA, 17 bp, Homo sapiens
agaatagattatttttc

SEQ ID NO: 3090 - DNA, 17 bp, Homo sapiens
gaatagattatttttct

SEQ ID NO: 3091 - DNA, 17 bp, Homo sapiens
aatagattatttttctg

SEQ ID NO: 3092 - DNA, 17 bp, Homo sapiens
atagattatttttctga

SEQ ID NO: 3093 - DNA, 17 bp, Homo sapiens
tagattatttttctgaa

SEQ ID NO: 3094 - DNA, 17 bp, Homo sapiens
agattatttttctgaat

SEQ ID NO: 3095 - DNA, 17 bp, Homo sapiens
gattatttttctgaata

SEQ ID NO: 3096 - DNA, 17 bp, Homo sapiens
attatttttctgaatag

SEQ ID NO: 3097 - DNA, 17 bp, Homo sapiens
ttatttttctgaatagt

SEQ ID NO: 3098 - DNA, 17 bp, Homo sapiens
tatttttctgaatagtt

SEQ ID NO: 3099 - DNA, 17 bp, Homo sapiens
atttttctgaatagtta

SEQ ID NO: 3100 - DNA, 17 bp, Homo sapiens
tttttctgaatagttaa

SEQ ID NO: 3101 - DNA, 17 bp, Homo sapiens
ttttctgaatagttaaa

SEQ ID NO: 3102 - DNA, 17 bp, Homo sapiens
tttctgaatagttaaac

SEQ ID NO: 3103 - DNA, 17 bp, Homo sapiens
ttctgaatagttaaacc

SEQ ID NO: 3104 - DNA, 17 bp, Homo sapiens
tctgaatagttaaacct

SEQ ID NO: 3105 - DNA, 17 bp, Homo sapiens
ctgaatagttaaacctt

SEQ ID NO: 3106 - DNA, 17 bp, Homo sapiens
tgaatagttaaaccttt

SEQ ID NO: 3107 - DNA, 17 bp, Homo sapiens
gaatagttaaacctttg

SEQ ID NO: 3108 - DNA, 17 bp, Homo sapiens
aatagttaaacctttga

SEQ ID NO: 3109 - DNA, 17 bp, Homo sapiens
atagttaaacctttgat

SEQ ID NO: 3110 - DNA, 17 bp, Homo sapiens
tagttaaacctttgatg

SEQ ID NO: 3111 - DNA, 17 bp, Homo sapiens
agttaaacctttgatgg

SEQ ID NO: 3112 - DNA, 17 bp, Homo sapiens
gttaaacctttgatggc

SEQ ID NO: 3113 - DNA, 17 bp, Homo sapiens
ttaaacctttgatggcc

SEQ ID NO: 3114 - DNA, 17 bp, Homo sapiens
taaacctttgatggcca

SEQ ID NO: 3115 - DNA, 17 bp, Homo sapiens
aaacctttgatggccat

SEQ ID NO: 3116 - DNA, 17 bp, Homo sapiens
aacctttgatggccata

SEQ ID NO: 3117 - DNA, 17 bp, Homo sapiens
acctttgatggccataa

SEQ ID NO: 3118 - DNA, 17 bp, Homo sapiens
cctttgatggccataac

SEQ ID NO: 3119 - DNA, 17 bp, Homo sapiens
ctttgatggccataacc

SEQ ID NO: 3120 - DNA, 17 bp, Homo sapiens
tttgatggccataacct

SEQ ID NO: 3121 - DNA, 17 bp, Homo sapiens
ttgatggccataacctt

SEQ ID NO: 3122 - DNA, 17 bp, Homo sapiens
tgatggccataaccttg

SEQ ID NO: 3123 - DNA, 17 bp, Homo sapiens
gatggccataaccttga

SEQ ID NO: 3124 - DNA, 17 bp, Homo sapiens
atggccataaccttgac

SEQ ID NO: 3125 - DNA, 17 bp, Homo sapiens
tggccataaccttgacc

SEQ ID NO: 3126 - DNA, 17 bp, Homo sapiens
ggccataaccttgaccc

SEQ ID NO: 3127 - DNA, 17 bp, Homo sapiens
gccataaccttgaccct

SEQ ID NO: 3128 - DNA, 17 bp, Homo sapiens
ccataaccttgaccctt

SEQ ID NO: 3129 - DNA, 17 bp, Homo sapiens
cataaccttgacccttc

SEQ ID NO: 3130 - DNA, 17 bp, Homo sapiens
ataaccttgacccttca

SEQ ID NO: 3131 - DNA, 17 bp, Homo sapiens
taaccttgacccttcag

SEQ ID NO: 3132 - DNA, 17 bp, Homo sapiens
aaccttgacccttcaga

SEQ ID NO: 3133 - DNA, 17 bp, Homo sapiens
accttgacccttcagac

SEQ ID NO: 3134 - DNA, 17 bp, Homo sapiens
ccttgacccttcagact

SEQ ID NO: 3135 - DNA, 17 bp, Homo sapiens
cttgacccttcagactg

SEQ ID NO: 3136 - DNA, 17 bp, Homo sapiens
ttgacccttcagactgc

SEQ ID NO: 3137 - DNA, 17 bp, Homo sapiens
tgacccttcagactgca

SEQ ID NO: 3138 - DNA, 17 bp, Homo sapiens
gacccttcagactgcag

SEQ ID NO: 3139 - DNA, 17 bp, Homo sapiens
acccttcagactgcaga

SEQ ID NO: 3140 - DNA, 17 bp, Homo sapiens
cccttcagactgcagag

SEQ ID NO: 3141 - DNA, 17 bp, Homo sapiens
ccttcagactgcagaga

SEQ ID NO: 3142 - DNA, 17 bp, Homo sapiens
cttcagactgcagagat

SEQ ID NO: 3143 - DNA, 17 bp, Homo sapiens
ttcagactgcagagatg

SEQ ID NO: 3144 - DNA, 17 bp, Homo sapiens
tcagactgcagagatgc

SEQ ID NO: 3145 - DNA, 17 bp, Homo sapiens
cagactgcagagatgca

SEQ ID NO: 3146 - DNA, 17 bp, Homo sapiens
agactgcagagatgcag

SEQ ID NO: 3147 - DNA, 17 bp, Homo sapiens
gactgcagagatgcagg

SEQ ID NO: 3148 - DNA, 17 bp, Homo sapiens
actgcagagatgcagga

SEQ ID NO: 3149 - DNA, 17 bp, Homo sapiens
ctgcagagatgcaggaa

SEQ ID NO: 3150 - DNA, 17 bp, Homo sapiens
tgcagagatgcaggaag

SEQ ID NO: 3151 - DNA, 17 bp, Homo sapiens
gcagagatgcaggaagg

SEQ ID NO: 3152 - DNA, 17 bp, Homo sapiens
cagagatgcaggaagga

SEQ ID NO: 3153 - DNA, 17 bp, Homo sapiens
agagatgcaggaaggac

SEQ ID NO: 3154 - DNA, 17 bp, Homo sapiens
gagatgcaggaaggact

SEQ ID NO: 3155 - DNA, 17 bp, Homo sapiens
agatgcaggaaggactt

SEQ ID NO: 3156 - DNA, 17 bp, Homo sapiens
gatgcaggaaggacttc

SEQ ID NO: 3157 - DNA, 17 bp, Homo sapiens
atgcaggaaggacttct

SEQ ID NO: 3158 - DNA, 17 bp, Homo sapiens
tgcaggaaggacttctg

SEQ ID NO: 3159 - DNA, 17 bp, Homo sapiens
gcaggaaggacttctgg

SEQ ID NO: 3160 - DNA, 17 bp, Homo sapiens
caggaaggacttctggc

SEQ ID NO: 3161 - DNA, 17 bp, Homo sapiens
aggaaggacttctggca

SEQ ID NO: 3162 - DNA, 17 bp, Homo sapiens
ggaaggacttctggcag

SEQ ID NO: 3163 - DNA, 17 bp, Homo sapiens
gaaggacttctggcagt

SEQ ID NO: 3164 - DNA, 17 bp, Homo sapiens
aaggacttctggcagtg

SEQ ID NO: 3165 - DNA, 17 bp, Homo sapiens
aggacttctggcagtga

SEQ ID NO: 3166 - DNA, 17 bp, Homo sapiens
ggacttctggcagtgaa

SEQ ID NO: 3167 - DNA, 17 bp, Homo sapiens
gacttctggcagtgaag

SEQ ID NO: 3168 - DNA, 17 bp, Homo sapiens
acttctggcagtgaagg

SEQ ID NO: 3169 - DNA, 17 bp, Homo sapiens
cttctggcagtgaaggt

SEQ ID NO: 3170 - DNA, 17 bp, Homo sapiens
ttctggcagtgaaggta

SEQ ID NO: 3171 - DNA, 17 bp, Homo sapiens
tctggcagtgaaggtaa

SEQ ID NO: 3172 - DNA, 17 bp, Homo sapiens
ctggcagtgaaggtaaa

SEQ ID NO: 3173 - DNA, 17 bp, Homo sapiens
tggcagtgaaggtaaag

SEQ ID NO: 3174 - DNA, 17 bp, Homo sapiens
ggcagtgaaggtaaagg

SEQ ID NO: 3175 - DNA, 17 bp, Homo sapiens
gcagtgaaggtaaagga

SEQ ID NO: 3176 - DNA, 17 bp, Homo sapiens
cagtgaaggtaaaggag

SEQ ID NO: 3177 - DNA, 17 bp, Homo sapiens
agtgaaggtaaaggagg

SEQ ID NO: 3178 - DNA, 17 bp, Homo sapiens
gtgaaggtaaaggagga

SEQ ID NO: 3179 - DNA, 17 bp, Homo sapiens
tgaaggtaaaggaggaa

SEQ ID NO: 3180 - DNA, 17 bp, Homo sapiens
gaaggtaaaggaggaag

SEQ ID NO: 3181 - DNA, 17 bp, Homo sapiens
aaggtaaaggaggaaga

SEQ ID NO: 3182 - DNA, 17 bp, Homo sapiens
aggtaaaggaggaagag

SEQ ID NO: 3183 - DNA, 17 bp, Homo sapiens
ggtaaaggaggaagagg

SEQ ID NO: 3184 - DNA, 17 bp, Homo sapiens
gtaaaggaggaagagga

SEQ ID NO: 3185 - DNA, 17 bp, Homo sapiens
taaaggaggaagaggag

SEQ ID NO: 3186 - DNA, 17 bp, Homo sapiens
aaaggaggaagaggagg

SEQ ID NO: 3187 - DNA, 17 bp, Homo sapiens
aaggaggaagaggagga

SEQ ID NO: 3188 - DNA, 17 bp, Homo sapiens
aggaggaagaggaggaa

SEQ ID NO: 3189 - DNA, 17 bp, Homo sapiens
ggaggaagaggaggaac

SEQ ID NO: 3190 - DNA, 17 bp, Homo sapiens
gaggaagaggaggaaca

SEQ ID NO: 3191 - DNA, 17 bp, Homo sapiens
aggaagaggaggaacat

SEQ ID NO: 3192 - DNA, 17 bp, Homo sapiens
ggaagaggaggaacatt

SEQ ID NO: 3193 - DNA, 17 bp, Homo sapiens
gaagaggaggaacattc

SEQ ID NO: 3194 - DNA, 17 bp, Homo sapiens
aagaggaggaacattcc

SEQ ID NO: 3195 - DNA, 17 bp, Homo sapiens
agaggaggaacattcct

SEQ ID NO: 3196 - DNA, 17 bp, Homo sapiens
gaggaggaacattcctg

SEQ ID NO: 3197 - DNA, 17 bp, Homo sapiens
aggaggaacattcctgt

SEQ ID NO: 3198 - DNA, 17 bp, Homo sapiens
ggaggaacattcctgtg

SEQ ID NO: 3199 - DNA, 17 bp, Homo sapiens
gaggaacattcctgtgg

SEQ ID NO: 3200 - DNA, 17 bp, Homo sapiens
aggaacattcctgtggg

SEQ ID NO: 3201 - DNA, 17 bp, Homo sapiens
ggaacattcctgtgggc

SEQ ID NO: 3202 - DNA, 17 bp, Homo sapiens
gaacattcctgtgggcc

SEQ ID NO: 3203 - DNA, 17 bp, Homo sapiens
aacattcctgtgggcca

SEQ ID NO: 3204 - DNA, 17 bp, Homo sapiens
acattcctgtgggccag

SEQ ID NO: 3205 - DNA, 17 bp, Homo sapiens
cattcctgtgggccaga

SEQ ID NO: 3206 - DNA, 17 bp, Homo sapiens
attcctgtgggccagaa

SEQ ID NO: 3207 - DNA, 17 bp, Homo sapiens
ttcctgtgggccagaat

SEQ ID NO: 3208 - DNA, 17 bp, Homo sapiens
tcctgtgggccagaatc

SEQ ID NO: 3209 - DNA, 17 bp, Homo sapiens
cctgtgggccagaatca

SEQ ID NO: 3210 - DNA, 17 bp, Homo sapiens
ctgtgggccagaatcag

SEQ ID NO: 3211 - DNA, 17 bp, Homo sapiens
tgtgggccagaatcagg

SEQ ID NO: 3212 - DNA, 17 bp, Homo sapiens
gtgggccagaatcaggc

SEQ ID NO: 3213 - DNA, 17 bp, Homo sapiens
tgggccagaatcaggcc

SEQ ID NO: 3214 - DNA, 17 bp, Homo sapiens
gggccagaatcaggcct

SEQ ID NO: 3215 - DNA, 17 bp, Homo sapiens
ggccagaatcaggcctg

SEQ ID NO: 3216 - DNA, 17 bp, Homo sapiens
gccagaatcaggcctgt

SEQ ID NO: 3217 - DNA, 17 bp, Homo sapiens
ccagaatcaggcctgtc

SEQ ID NO: 3218 - DNA, 17 bp, Homo sapiens
cagaatcaggcctgtca

SEQ ID NO: 3219 - DNA, 17 bp, Homo sapiens
agaatcaggcctgtcaa

SEQ ID NO: 3220 - DNA, 17 bp, Homo sapiens
gaatcaggcctgtcaag

SEQ ID NO: 3221 - DNA, 17 bp, Homo sapiens
aatcaggcctgtcaaga

SEQ ID NO: 3222 - DNA, 17 bp, Homo sapiens
atcaggcctgtcaagaa

SEQ ID NO: 3223 - DNA, 17 bp, Homo sapiens
tcaggcctgtcaagaaa

SEQ ID NO: 3224 - DNA, 17 bp, Homo sapiens
caggcctgtcaagaaat

SEQ ID NO: 3225 - DNA, 17 bp, Homo sapiens
aggcctgtcaagaaata

SEQ ID NO: 3226 - DNA, 17 bp, Homo sapiens
ggcctgtcaagaaataa

SEQ ID NO: 3227 - DNA, 17 bp, Homo sapiens
gcctgtcaagaaataac

SEQ ID NO: 3228 - DNA, 17 bp, Homo sapiens
cctgtcaagaaataacc

SEQ ID NO: 3229 - DNA, 17 bp, Homo sapiens
ctgtcaagaaataaccc

SEQ ID NO: 3230 - DNA, 17 bp, Homo sapiens
tgtcaagaaataaccct

SEQ ID NO: 3231 - DNA, 17 bp, Homo sapiens
gtcaagaaataaccctc

SEQ ID NO: 3232 - DNA, 17 bp, Homo sapiens
tcaagaaataaccctca

SEQ ID NO: 3233 - DNA, 17 bp, Homo sapiens
caagaaataaccctcat

SEQ ID NO: 3234 - DNA, 17 bp, Homo sapiens
aagaaataaccctcata

SEQ ID NO: 3235 - DNA, 17 bp, Homo sapiens
agaaataaccctcatac

SEQ ID NO: 3236 - DNA, 17 bp, Homo sapiens
gaaataaccctcatacc

SEQ ID NO: 3237 - DNA, 17 bp, Homo sapiens
aaataaccctcatacca

SEQ ID NO: 3238 - DNA, 17 bp, Homo sapiens
aataaccctcataccag

SEQ ID NO: 3239 - DNA, 17 bp, Homo sapiens
ataaccctcataccaga

SEQ ID NO: 3240 - DNA, 17 bp, Homo sapiens
taaccctcataccagag

SEQ ID NO: 3241 - DNA, 17 bp, Homo sapiens
aaccctcataccagaga

SEQ ID NO: 3242 - DNA, 17 bp, Homo sapiens
accctcataccagagag

SEQ ID NO: 3243 - DNA, 17 bp, Homo sapiens
ccctcataccagagaga

SEQ ID NO: 3244 - DNA, 17 bp, Homo sapiens
cctcataccagagagat

SEQ ID NO: 3245 - DNA, 17 bp, Homo sapiens
ctcataccagagagatc

SEQ ID NO: 3246 - DNA, 17 bp, Homo sapiens
tcataccagagagatct

SEQ ID NO: 3247 - DNA, 17 bp, Homo sapiens
cataccagagagatctt

SEQ ID NO: 3248 - DNA, 17 bp, Homo sapiens
ataccagagagatcttt

SEQ ID NO: 3249 - DNA, 17 bp, Homo sapiens
taccagagagatctttc

SEQ ID NO: 3250 - DNA, 17 bp, Homo sapiens
accagagagatctttcg

SEQ ID NO: 3251 - DNA, 17 bp, Homo sapiens
ccagagagatctttcgt

SEQ ID NO: 3252 - DNA, 17 bp, Homo sapiens
cagagagatctttcgta

SEQ ID NO: 3253 - DNA, 17 bp, Homo sapiens
agagagatctttcgtag

SEQ ID NO: 3254 - DNA, 17 bp, Homo sapiens
gagagatctttcgtaga

SEQ ID NO: 3255 - DNA, 17 bp, Homo sapiens
agagatctttcgtagac

SEQ ID NO: 3256 - DNA, 17 bp, Homo sapiens
gagatctttcgtagacg

SEQ ID NO: 3257 - DNA, 17 bp, Homo sapiens
agatctttcgtagacgc

SEQ ID NO: 3258 - DNA, 17 bp, Homo sapiens
gatctttcgtagacgct

SEQ ID NO: 3259 - DNA, 17 bp, Homo sapiens
atctttcgtagacgctt

SEQ ID NO: 3260 - DNA, 17 bp, Homo sapiens
tctttcgtagacgcttc

SEQ ID NO: 3261 - DNA, 17 bp, Homo sapiens
ctttcgtagacgcttca

SEQ ID NO: 3262 - DNA, 17 bp, Homo sapiens
tttcgtagacgcttcag

SEQ ID NO: 3263 - DNA, 17 bp, Homo sapiens
ttcgtagacgcttcagg

SEQ ID NO: 3264 - DNA, 17 bp, Homo sapiens
tcgtagacgcttcaggc

SEQ ID NO: 3265 - DNA, 17 bp, Homo sapiens
cgtagacgcttcaggca

SEQ ID NO: 3266 - DNA, 17 bp, Homo sapiens
gtagacgcttcaggcag

SEQ ID NO: 3267 - DNA, 17 bp, Homo sapiens
tagacgcttcaggcagt

SEQ ID NO: 3268 - DNA, 17 bp, Homo sapiens
agacgcttcaggcagtt

SEQ ID NO: 3269 - DNA, 17 bp, Homo sapiens
gacgcttcaggcagttc

SEQ ID NO: 3270 - DNA, 17 bp, Homo sapiens
acgcttcaggcagttct

SEQ ID NO: 3271 - DNA, 17 bp, Homo sapiens
cgcttcaggcagttctg

SEQ ID NO: 3272 - DNA, 17 bp, Homo sapiens
gcttcaggcagttctgc

SEQ ID NO: 3273 - DNA, 17 bp, Homo sapiens
cttcaggcagttctgct

SEQ ID NO: 3274 - DNA, 17 bp, Homo sapiens
ttcaggcagttctgcta

SEQ ID NO: 3275 - DNA, 17 bp, Homo sapiens
tcaggcagttctgctat

SEQ ID NO: 3276 - DNA, 17 bp, Homo sapiens
caggcagttctgctatc

SEQ ID NO: 3277 - DNA, 17 bp, Homo sapiens
aggcagttctgctatca

SEQ ID NO: 3278 - DNA, 17 bp, Homo sapiens
ggcagttctgctatcag

SEQ ID NO: 3279 - DNA, 17 bp, Homo sapiens
gcagttctgctatcagg

SEQ ID NO: 3280 - DNA, 17 bp, Homo sapiens
cagttctgctatcagga

SEQ ID NO: 3281 - DNA, 17 bp, Homo sapiens
agttctgctatcaggag

SEQ ID NO: 3282 - DNA, 17 bp, Homo sapiens
gttctgctatcaggagt

SEQ ID NO: 3283 - DNA, 17 bp, Homo sapiens
ttctgctatcaggagtc

SEQ ID NO: 3284 - DNA, 17 bp, Homo sapiens
tctgctatcaggagtcc

SEQ ID NO: 3285 - DNA, 17 bp, Homo sapiens
ctgctatcaggagtccc

SEQ ID NO: 3286 - DNA, 17 bp, Homo sapiens
tgctatcaggagtcccc

SEQ ID NO: 3287 - DNA, 17 bp, Homo sapiens
gctatcaggagtcccct

SEQ ID NO: 3288 - DNA, 17 bp, Homo sapiens
ctatcaggagtcccctg

SEQ ID NO: 3289 - DNA, 17 bp, Homo sapiens
tatcaggagtcccctgg

SEQ ID NO: 3290 - DNA, 17 bp, Homo sapiens
atcaggagtcccctggg

SEQ ID NO: 3291 - DNA, 17 bp, Homo sapiens
tcaggagtcccctgggc

SEQ ID NO: 3292 - DNA, 17 bp, Homo sapiens
caggagtcccctgggcc

SEQ ID NO: 3293 - DNA, 17 bp, Homo sapiens
aggagtcccctgggccc

SEQ ID NO: 3294 - DNA, 17 bp, Homo sapiens
ggagtcccctgggcccc

SEQ ID NO: 3295 - DNA, 17 bp, Homo sapiens
gagtcccctgggccccg

SEQ ID NO: 3296 - DNA, 17 bp, Homo sapiens
agtcccctgggccccgg

SEQ ID NO: 3297 - DNA, 17 bp, Homo sapiens
gtcccctgggccccggg

SEQ ID NO: 3298 - DNA, 17 bp, Homo sapiens
tcccctgggccccggga

SEQ ID NO: 3299 - DNA, 17 bp, Homo sapiens
cccctgggccccgggag

SEQ ID NO: 3300 - DNA, 17 bp, Homo sapiens
ccctgggccccgggagg

SEQ ID NO: 3301 - DNA, 17 bp, Homo sapiens
cctgggccccgggaggc

SEQ ID NO: 3302 - DNA, 17 bp, Homo sapiens
ctgggccccgggaggct

SEQ ID NO: 3303 - DNA, 17 bp, Homo sapiens
tgggccccgggaggctc

SEQ ID NO: 3304 - DNA, 17 bp, Homo sapiens
gggccccgggaggctct

SEQ ID NO: 3305 - DNA, 17 bp, Homo sapiens
ggccccgggaggctctt

SEQ ID NO: 3306 - DNA, 17 bp, Homo sapiens
gccccgggaggctcttc

SEQ ID NO: 3307 - DNA, 17 bp, Homo sapiens
ccccgggaggctcttca

SEQ ID NO: 3308 - DNA, 17 bp, Homo sapiens
cccgggaggctcttcaa

SEQ ID NO: 3309 - DNA, 17 bp, Homo sapiens
ccgggaggctcttcaaa

SEQ ID NO: 3310 - DNA, 17 bp, Homo sapiens
cgggaggctcttcaaag

SEQ ID NO: 3311 - DNA, 17 bp, Homo sapiens
gggaggctcttcaaaga

SEQ ID NO: 3312 - DNA, 17 bp, Homo sapiens
ggaggctcttcaaagac

SEQ ID NO: 3313 - DNA, 17 bp, Homo sapiens
gaggctcttcaaagact

SEQ ID NO: 3314 - DNA, 17 bp, Homo sapiens
aggctcttcaaagactc

SEQ ID NO: 3315 - DNA, 17 bp, Homo sapiens
ggctcttcaaagactcc

SEQ ID NO: 3316 - DNA, 17 bp, Homo sapiens
gctcttcaaagactcca

SEQ ID NO: 3317 - DNA, 17 bp, Homo sapiens
ctcttcaaagactccag

SEQ ID NO: 3318 - DNA, 17 bp, Homo sapiens
tcttcaaagactccagg

SEQ ID NO: 3319 - DNA, 17 bp, Homo sapiens
cttcaaagactccagga

SEQ ID NO: 3320 - DNA, 17 bp, Homo sapiens
ttcaaagactccaggag

SEQ ID NO: 3321 - DNA, 17 bp, Homo sapiens
tcaaagactccaggagc

SEQ ID NO: 3322 - DNA, 17 bp, Homo sapiens
caaagactccaggagct

SEQ ID NO: 3323 - DNA, 17 bp, Homo sapiens
aaagactccaggagctc

SEQ ID NO: 3324 - DNA, 17 bp, Homo sapiens
aagactccaggagctct

SEQ ID NO: 3325 - DNA, 17 bp, Homo sapiens
agactccaggagctctg

SEQ ID NO: 3326 - DNA, 17 bp, Homo sapiens
gactccaggagctctgc

SEQ ID NO: 3327 - DNA, 17 bp, Homo sapiens
actccaggagctctgcc

SEQ ID NO: 3328 - DNA, 17 bp, Homo sapiens
ctccaggagctctgcca

SEQ ID NO: 3329 - DNA, 17 bp, Homo sapiens
tccaggagctctgccat

SEQ ID NO: 3330 - DNA, 17 bp, Homo sapiens
ccaggagctctgccatc

SEQ ID NO: 3331 - DNA, 17 bp, Homo sapiens
caggagctctgccatca

SEQ ID NO: 3332 - DNA, 17 bp, Homo sapiens
aggagctctgccatcag

SEQ ID NO: 3333 - DNA, 17 bp, Homo sapiens
ggagctctgccatcagt

SEQ ID NO: 3334 - DNA, 17 bp, Homo sapiens
gagctctgccatcagtg

SEQ ID NO: 3335 - DNA, 17 bp, Homo sapiens
agctctgccatcagtgg

SEQ ID NO: 3336 - DNA, 17 bp, Homo sapiens
gctctgccatcagtggc

SEQ ID NO: 3337 - DNA, 17 bp, Homo sapiens
ctctgccatcagtggct

SEQ ID NO: 3338 - DNA, 17 bp, Homo sapiens
tctgccatcagtggctg

SEQ ID NO: 3339 - DNA, 17 bp, Homo sapiens
ctgccatcagtggctga

SEQ ID NO: 3340 - DNA, 17 bp, Homo sapiens
tgccatcagtggctgag

SEQ ID NO: 3341 - DNA, 17 bp, Homo sapiens
gccatcagtggctgaga

SEQ ID NO: 3342 - DNA, 17 bp, Homo sapiens
ccatcagtggctgagac

SEQ ID NO: 3343 - DNA, 17 bp, Homo sapiens
catcagtggctgagacc

SEQ ID NO: 3344 - DNA, 17 bp, Homo sapiens
atcagtggctgagacca

SEQ ID NO: 3345 - DNA, 17 bp, Homo sapiens
tcagtggctgagaccag

SEQ ID NO: 3346 - DNA, 17 bp, Homo sapiens
cagtggctgagaccaga

SEQ ID NO: 3347 - DNA, 17 bp, Homo sapiens
agtggctgagaccagag

SEQ ID NO: 3348 - DNA, 17 bp, Homo sapiens
gtggctgagaccagaga

SEQ ID NO: 3349 - DNA, 17 bp, Homo sapiens
tggctgagaccagagat

SEQ ID NO: 3350 - DNA, 17 bp, Homo sapiens
ggctgagaccagagatg

SEQ ID NO: 3351 - DNA, 17 bp, Homo sapiens
gctgagaccagagatgc

SEQ ID NO: 3352 - DNA, 17 bp, Homo sapiens
ctgagaccagagatgca

SEQ ID NO: 3353 - DNA, 17 bp, Homo sapiens
tgagaccagagatgcac

SEQ ID NO: 3354 - DNA, 17 bp, Homo sapiens
gagaccagagatgcaca

SEQ ID NO: 3355 - DNA, 17 bp, Homo sapiens
agaccagagatgcacac

SEQ ID NO: 3356 - DNA, 17 bp, Homo sapiens
gaccagagatgcacacc

SEQ ID NO: 3357 - DNA, 17 bp, Homo sapiens
accagagatgcacacca

SEQ ID NO: 3358 - DNA, 17 bp, Homo sapiens
ccagagatgcacaccaa

SEQ ID NO: 3359 - DNA, 17 bp, Homo sapiens
cagagatgcacaccaag

SEQ ID NO: 3360 - DNA, 17 bp, Homo sapiens
agagatgcacaccaagg

SEQ ID NO: 3361 - DNA, 17 bp, Homo sapiens
gagatgcacaccaagga

SEQ ID NO: 3362 - DNA, 17 bp, Homo sapiens
agatgcacaccaaggag

SEQ ID NO: 3363 - DNA, 17 bp, Homo sapiens
gatgcacaccaaggagc

SEQ ID NO: 3364 - DNA, 17 bp, Homo sapiens
atgcacaccaaggagca

SEQ ID NO: 3365 - DNA, 17 bp, Homo sapiens
tgcacaccaaggagcag

SEQ ID NO: 3366 - DNA, 17 bp, Homo sapiens
gcacaccaaggagcaga

SEQ ID NO: 3367 - DNA, 17 bp, Homo sapiens
cacaccaaggagcagat

SEQ ID NO: 3368 - DNA, 17 bp, Homo sapiens
acaccaaggagcagatc

SEQ ID NO: 3369 - DNA, 17 bp, Homo sapiens
caccaaggagcagatcc

SEQ ID NO: 3370 - DNA, 17 bp, Homo sapiens
accaaggagcagatcct

SEQ ID NO: 3371 - DNA, 17 bp, Homo sapiens
ccaaggagcagatccta

SEQ ID NO: 3372 - DNA, 17 bp, Homo sapiens
caaggagcagatcctag

SEQ ID NO: 3373 - DNA, 17 bp, Homo sapiens
aaggagcagatcctaga

SEQ ID NO: 3374 - DNA, 17 bp, Homo sapiens
aggagcagatcctagag

SEQ ID NO: 3375 - DNA, 17 bp, Homo sapiens
ggagcagatcctagagc

SEQ ID NO: 3376 - DNA, 17 bp, Homo sapiens
gagcagatcctagagct

SEQ ID NO: 3377 - DNA, 17 bp, Homo sapiens
agcagatcctagagctg

SEQ ID NO: 3378 - DNA, 17 bp, Homo sapiens
gcagatcctagagctgc

SEQ ID NO: 3379 - DNA, 17 bp, Homo sapiens
cagatcctagagctgct

SEQ ID NO: 3380 - DNA, 17 bp, Homo sapiens
agatcctagagctgctg

SEQ ID NO: 3381 - DNA, 17 bp, Homo sapiens
gatcctagagctgctgg

SEQ ID NO: 3382 - DNA, 17 bp, Homo sapiens
atcctagagctgctggt

SEQ ID NO: 3383 - DNA, 17 bp, Homo sapiens
tcctagagctgctggtg

SEQ ID NO: 3384 - DNA, 17 bp, Homo sapiens
cctagagctgctggtgc

SEQ ID NO: 3385 - DNA, 17 bp, Homo sapiens
ctagagctgctggtgct

SEQ ID NO: 3386 - DNA, 17 bp, Homo sapiens
tagagctgctggtgctg

SEQ ID NO: 3387 - DNA, 17 bp, Homo sapiens
agagctgctggtgctgg

SEQ ID NO: 3388 - DNA, 17 bp, Homo sapiens
gagctgctggtgctgga

SEQ ID NO: 3389 - DNA, 17 bp, Homo sapiens
agctgctggtgctggag

SEQ ID NO: 3390 - DNA, 17 bp, Homo sapiens
gctgctggtgctggagc

SEQ ID NO: 3391 - DNA, 17 bp, Homo sapiens
ctgctggtgctggagca

SEQ ID NO: 3392 - DNA, 17 bp, Homo sapiens
tgctggtgctggagcag

SEQ ID NO: 3393 - DNA, 17 bp, Homo sapiens
gctggtgctggagcagt

SEQ ID NO: 3394 - DNA, 17 bp, Homo sapiens
ctggtgctggagcagtt

SEQ ID NO: 3395 - DNA, 17 bp, Homo sapiens
tggtgctggagcagttc

SEQ ID NO: 3396 - DNA, 17 bp, Homo sapiens
ggtgctggagcagttcc

SEQ ID NO: 3397 - DNA, 17 bp, Homo sapiens
gtgctggagcagttcct

SEQ ID NO: 3398 - DNA, 17 bp, Homo sapiens
tgctggagcagttcctg

SEQ ID NO: 3399 - DNA, 17 bp, Homo sapiens
gctggagcagttcctga

SEQ ID NO: 3400 - DNA, 17 bp, Homo sapiens
ctggagcagttcctgac

SEQ ID NO: 3401 - DNA, 17 bp, Homo sapiens
tggagcagttcctgact

SEQ ID NO: 3402 - DNA, 17 bp, Homo sapiens
ggagcagttcctgacta

SEQ ID NO: 3403 - DNA, 17 bp, Homo sapiens
gagcagttcctgactat

SEQ ID NO: 3404 - DNA, 17 bp, Homo sapiens
agcagttcctgactatc

SEQ ID NO: 3405 - DNA, 17 bp, Homo sapiens
gcagttcctgactatcc

SEQ ID NO: 3406 - DNA, 17 bp, Homo sapiens
cagttcctgactatcct

SEQ ID NO: 3407 - DNA, 17 bp, Homo sapiens
agttcctgactatcctg

SEQ ID NO: 3408 - DNA, 17 bp, Homo sapiens
gttcctgactatcctgc

SEQ ID NO: 3409 - DNA, 17 bp, Homo sapiens
ttcctgactatcctgcc

SEQ ID NO: 3410 - DNA, 17 bp, Homo sapiens
tcctgactatcctgcct

SEQ ID NO: 3411 - DNA, 17 bp, Homo sapiens
cctgactatcctgcctg

SEQ ID NO: 3412 - DNA, 17 bp, Homo sapiens
ctgactatcctgcctga

SEQ ID NO: 3413 - DNA, 17 bp, Homo sapiens
tgactatcctgcctgag

SEQ ID NO: 3414 - DNA, 17 bp, Homo sapiens
gactatcctgcctgagg

SEQ ID NO: 3415 - DNA, 17 bp, Homo sapiens
actatcctgcctgagga

SEQ ID NO: 3416 - DNA, 17 bp, Homo sapiens
ctatcctgcctgaggag

SEQ ID NO: 3417 - DNA, 17 bp, Homo sapiens
tatcctgcctgaggagc

SEQ ID NO: 3418 - DNA, 17 bp, Homo sapiens
atcctgcctgaggagct

SEQ ID NO: 3419 - DNA, 17 bp, Homo sapiens
tcctgcctgaggagctc

SEQ ID NO: 3420 - DNA, 17 bp, Homo sapiens
cctgcctgaggagctcc

SEQ ID NO: 3421 - DNA, 17 bp, Homo sapiens
ctgcctgaggagctcca

SEQ ID NO: 3422 - DNA, 17 bp, Homo sapiens
tgcctgaggagctccag

SEQ ID NO: 3423 - DNA, 17 bp, Homo sapiens
gcctgaggagctccagg

SEQ ID NO: 3424 - DNA, 17 bp, Homo sapiens
cctgaggagctccaggc

SEQ ID NO: 3425 - DNA, 17 bp, Homo sapiens
ctgaggagctccaggcc

SEQ ID NO: 3426 - DNA, 17 bp, Homo sapiens
tgaggagctccaggcct

SEQ ID NO: 3427 - DNA, 17 bp, Homo sapiens
gaggagctccaggcctg

SEQ ID NO: 3428 - DNA, 17 bp, Homo sapiens
aggagctccaggcctgg

SEQ ID NO: 3429 - DNA, 17 bp, Homo sapiens
ggagctccaggcctggg

SEQ ID NO: 3430 - DNA, 17 bp, Homo sapiens
gagctccaggcctgggt

SEQ ID NO: 3431 - DNA, 17 bp, Homo sapiens
agctccaggcctgggtc

SEQ ID NO: 3432 - DNA, 17 bp, Homo sapiens
gctccaggcctgggtca

SEQ ID NO: 3433 - DNA, 17 bp, Homo sapiens
ctccaggcctgggtcag

SEQ ID NO: 3434 - DNA, 17 bp, Homo sapiens
tccaggcctgggtcaga

SEQ ID NO: 3435 - DNA, 17 bp, Homo sapiens
ccaggcctgggtcagac

SEQ ID NO: 3436 - DNA, 17 bp, Homo sapiens
caggcctgggtcagaca

SEQ ID NO: 3437 - DNA, 17 bp, Homo sapiens
aggcctgggtcagacag

SEQ ID NO: 3438 - DNA, 17 bp, Homo sapiens
ggcctgggtcagacagc

SEQ ID NO: 3439 - DNA, 17 bp, Homo sapiens
gcctgggtcagacagca

SEQ ID NO: 3440 - DNA, 17 bp, Homo sapiens
cctgggtcagacagcac

SEQ ID NO: 3441 - DNA, 17 bp, Homo sapiens
ctgggtcagacagcacc

SEQ ID NO: 3442 - DNA, 17 bp, Homo sapiens
tgggtcagacagcaccg

SEQ ID NO: 3443 - DNA, 17 bp, Homo sapiens
gggtcagacagcaccgt

SEQ ID NO: 3444 - DNA, 17 bp, Homo sapiens
ggtcagacagcaccgtc

SEQ ID NO: 3445 - DNA, 17 bp, Homo sapiens
gtcagacagcaccgtcc

SEQ ID NO: 3446 - DNA, 17 bp, Homo sapiens
tcagacagcaccgtcct

SEQ ID NO: 3447 - DNA, 17 bp, Homo sapiens
cagacagcaccgtcctg

SEQ ID NO: 3448 - DNA, 17 bp, Homo sapiens
agacagcaccgtcctgt

SEQ ID NO: 3449 - DNA, 17 bp, Homo sapiens
gacagcaccgtcctgtg

SEQ ID NO: 3450 - DNA, 17 bp, Homo sapiens
acagcaccgtcctgtga

SEQ ID NO: 3451 - DNA, 17 bp, Homo sapiens
cagcaccgtcctgtgag

SEQ ID NO: 3452 - DNA, 17 bp, Homo sapiens
agcaccgtcctgtgagt

SEQ ID NO: 3453 - DNA, 17 bp, Homo sapiens
gcaccgtcctgtgagtg

SEQ ID NO: 3454 - DNA, 17 bp, Homo sapiens
caccgtcctgtgagtgg

SEQ ID NO: 3455 - DNA, 17 bp, Homo sapiens
accgtcctgtgagtgga

SEQ ID NO: 3456 - DNA, 17 bp, Homo sapiens
ccgtcctgtgagtggag

SEQ ID NO: 3457 - DNA, 17 bp, Homo sapiens
cgtcctgtgagtggaga

SEQ ID NO: 3458 - DNA, 17 bp, Homo sapiens
gtcctgtgagtggagag

SEQ ID NO: 3459 - DNA, 17 bp, Homo sapiens
tcctgtgagtggagagg

SEQ ID NO: 3460 - DNA, 17 bp, Homo sapiens
cctgtgagtggagagga

SEQ ID NO: 3461 - DNA, 17 bp, Homo sapiens
ctgtgagtggagaggag

SEQ ID NO: 3462 - DNA, 17 bp, Homo sapiens
tgtgagtggagaggagg

SEQ ID NO: 3463 - DNA, 17 bp, Homo sapiens
gtgagtggagaggaggc

SEQ ID NO: 3464 - DNA, 17 bp, Homo sapiens
tgagtggagaggaggca

SEQ ID NO: 3465 - DNA, 17 bp, Homo sapiens
gagtggagaggaggcag

SEQ ID NO: 3466 - DNA, 17 bp, Homo sapiens
agtggagaggaggcagt

SEQ ID NO: 3467 - DNA, 17 bp, Homo sapiens
gtggagaggaggcagtg

SEQ ID NO: 3468 - DNA, 17 bp, Homo sapiens
tggagaggaggcagtga

SEQ ID NO: 3469 - DNA, 17 bp, Homo sapiens
ggagaggaggcagtgac

SEQ ID NO: 3470 - DNA, 17 bp, Homo sapiens
gagaggaggcagtgact

SEQ ID NO: 3471 - DNA, 17 bp, Homo sapiens
agaggaggcagtgactg

SEQ ID NO: 3472 - DNA, 17 bp, Homo sapiens
gaggaggcagtgactgt

SEQ ID NO: 3473 - DNA, 17 bp, Homo sapiens
aggaggcagtgactgtg

SEQ ID NO: 3474 - DNA, 17 bp, Homo sapiens
ggaggcagtgactgtgc

SEQ ID NO: 3475 - DNA, 17 bp, Homo sapiens
gaggcagtgactgtgct

SEQ ID NO: 3476 - DNA, 17 bp, Homo sapiens
aggcagtgactgtgctg

SEQ ID NO: 3477 - DNA, 17 bp, Homo sapiens
ggcagtgactgtgctgg

SEQ ID NO: 3478 - DNA, 17 bp, Homo sapiens
gcagtgactgtgctgga

SEQ ID NO: 3479 - DNA, 17 bp, Homo sapiens
cagtgactgtgctggag

SEQ ID NO: 3480 - DNA, 17 bp, Homo sapiens
agtgactgtgctggagg

SEQ ID NO: 3481 - DNA, 17 bp, Homo sapiens
gtgactgtgctggagga

SEQ ID NO: 3482 - DNA, 17 bp, Homo sapiens
tgactgtgctggaggat

SEQ ID NO: 3483 - DNA, 17 bp, Homo sapiens
gactgtgctggaggatt

SEQ ID NO: 3484 - DNA, 17 bp, Homo sapiens
actgtgctggaggattt

SEQ ID NO: 3485 - DNA, 17 bp, Homo sapiens
ctgtgctggaggatttg

SEQ ID NO: 3486 - DNA, 17 bp, Homo sapiens
tgtgctggaggatttgg

SEQ ID NO: 3487 - DNA, 17 bp, Homo sapiens
gtgctggaggatttgga

SEQ ID NO: 3488 - DNA, 17 bp, Homo sapiens
tgctggaggatttggag

SEQ ID NO: 3489 - DNA, 17 bp, Homo sapiens
gctggaggatttggaga

SEQ ID NO: 3490 - DNA, 17 bp, Homo sapiens
ctggaggatttggagag

SEQ ID NO: 3491 - DNA, 17 bp, Homo sapiens
tggaggatttggagaga

SEQ ID NO: 3492 - DNA, 17 bp, Homo sapiens
ggaggatttggagagag

SEQ ID NO: 3493 - DNA, 17 bp, Homo sapiens
gaggatttggagagaga

SEQ ID NO: 3494 - DNA, 17 bp, Homo sapiens
aggatttggagagagag

SEQ ID NO: 3495 - DNA, 17 bp, Homo sapiens
ggatttggagagagagc

SEQ ID NO: 3496 - DNA, 17 bp, Homo sapiens
gatttggagagagagct

SEQ ID NO: 3497 - DNA, 17 bp, Homo sapiens
atttggagagagagctg

SEQ ID NO: 3498 - DNA, 17 bp, Homo sapiens
tttggagagagagctgg

SEQ ID NO: 3499 - DNA, 17 bp, Homo sapiens
ttggagagagagctgga

SEQ ID NO: 3500 - DNA, 17 bp, Homo sapiens
tggagagagagctggat

SEQ ID NO: 3501 - DNA, 17 bp, Homo sapiens
ggagagagagctggatg

SEQ ID NO: 3502 - DNA, 17 bp, Homo sapiens
gagagagagctggatga

SEQ ID NO: 3503 - DNA, 17 bp, Homo sapiens
agagagagctggatgac

SEQ ID NO: 3504 - DNA, 17 bp, Homo sapiens
gagagagctggatgacc

SEQ ID NO: 3505 - DNA, 17 bp, Homo sapiens
agagagctggatgaccc

SEQ ID NO: 3506 - DNA, 17 bp, Homo sapiens
gagagctggatgaccca

SEQ ID NO: 3507 - DNA, 17 bp, Homo sapiens
agagctggatgacccag

SEQ ID NO: 3508 - DNA, 17 bp, Homo sapiens
gagctggatgacccagg

SEQ ID NO: 3509 - DNA, 17 bp, Homo sapiens
agctggatgacccagga

SEQ ID NO: 3510 - DNA, 17 bp, Homo sapiens
gctggatgacccaggag

SEQ ID NO: 3511 - DNA, 17 bp, Homo sapiens
ctggatgacccaggaga

SEQ ID NO: 3512 - DNA, 17 bp, Homo sapiens
tggatgacccaggagag

SEQ ID NO: 3513 - DNA, 17 bp, Homo sapiens
ggatgacccaggagagc

SEQ ID NO: 3514 - DNA, 17 bp, Homo sapiens
gatgacccaggagagca

SEQ ID NO: 3515 - DNA, 17 bp, Homo sapiens
atgacccaggagagcag

SEQ ID NO: 3516 - DNA, 25 bp, Homo sapiens
atctcggggtttccagaagaaaaga

SEQ ID NO: 3517 - DNA, 25 bp, Homo sapiens
tctcggggtttccagaagaaaagat

SEQ ID NO: 3518 - DNA, 25 bp, Homo sapiens
ctcggggtttccagaagaaaagatc

SEQ ID NO: 3519 - DNA, 25 bp, Homo sapiens
tcggggtttccagaagaaaagatca

SEQ ID NO: 3520 - DNA, 25 bp, Homo sapiens
cggggtttccagaagaaaagatcaa

SEQ ID NO: 3521 - DNA, 25 bp, Homo sapiens
ggggtttccagaagaaaagatcaag

SEQ ID NO: 3522 - DNA, 25 bp, Homo sapiens
gggtttccagaagaaaagatcaagg

SEQ ID NO: 3523 - DNA, 25 bp, Homo sapiens
ggtttccagaagaaaagatcaaggg

SEQ ID NO: 3524 - DNA, 25 bp, Homo sapiens
gtttccagaagaaaagatcaaggga

SEQ ID NO: 3525 - DNA, 25 bp, Homo sapiens
tttccagaagaaaagatcaagggag

SEQ ID NO: 3526 - DNA, 25 bp, Homo sapiens
ttccagaagaaaagatcaagggaga

SEQ ID NO: 3527 - DNA, 25 bp, Homo sapiens
tccagaagaaaagatcaagggagaa

SEQ ID NO: 3528 - DNA, 25 bp, Homo sapiens
ccagaagaaaagatcaagggagaat

SEQ ID NO: 3529 - DNA, 25 bp, Homo sapiens
cagaagaaaagatcaagggagaatt

SEQ ID NO: 3530 - DNA, 25 bp, Homo sapiens
agaagaaaagatcaagggagaatta

SEQ ID NO: 3531 - DNA, 25 bp, Homo sapiens
gaagaaaagatcaagggagaattat

SEQ ID NO: 3532 - DNA, 25 bp, Homo sapiens
aagaaaagatcaagggagaattatc

SEQ ID NO: 3533 - DNA, 25 bp, Homo sapiens
agaaaagatcaagggagaattatca

SEQ ID NO: 3534 - DNA, 25 bp, Homo sapiens
gaaaagatcaagggagaattatcaa

SEQ ID NO: 3535 - DNA, 25 bp, Homo sapiens
aaaagatcaagggagaattatcaag

SEQ ID NO: 3536 - DNA, 25 bp, Homo sapiens
aaagatcaagggagaattatcaaga

SEQ ID NO: 3537 - DNA, 25 bp, Homo sapiens
aagatcaagggagaattatcaagaa

SEQ ID NO: 3538 - DNA, 25 bp, Homo sapiens
agatcaagggagaattatcaagaat

SEQ ID NO: 3539 - DNA, 25 bp, Homo sapiens
gatcaagggagaattatcaagaata

SEQ ID NO: 3540 - DNA, 25 bp, Homo sapiens
atcaagggagaattatcaagaatag

SEQ ID NO: 3541 - DNA, 25 bp, Homo sapiens
tcaagggagaattatcaagaataga

SEQ ID NO: 3542 - DNA, 25 bp, Homo sapiens
caagggagaattatcaagaatagat

SEQ ID NO: 3543 - DNA, 25 bp, Homo sapiens
aagggagaattatcaagaatagatt

SEQ ID NO: 3544 - DNA, 25 bp, Homo sapiens
agggagaattatcaagaatagatta

SEQ ID NO: 3545 - DNA, 25 bp, Homo sapiens
gggagaattatcaagaatagattat

SEQ ID NO: 3546 - DNA, 25 bp, Homo sapiens
ggagaattatcaagaatagattatt

SEQ ID NO: 3547 - DNA, 25 bp, Homo sapiens
gagaattatcaagaatagattattt

SEQ ID NO: 3548 - DNA, 25 bp, Homo sapiens
agaattatcaagaatagattatttt

SEQ ID NO: 3549 - DNA, 25 bp, Homo sapiens
gaattatcaagaatagattattttt

SEQ ID NO: 3550 - DNA, 25 bp, Homo sapiens
aattatcaagaatagattatttttc

SEQ ID NO: 3551 - DNA, 25 bp, Homo sapiens
attatcaagaatagattatttttct

SEQ ID NO: 3552 - DNA, 25 bp, Homo sapiens
ttatcaagaatagattatttttctg

SEQ ID NO: 3553 - DNA, 25 bp, Homo sapiens
tatcaagaatagattatttttctga

SEQ ID NO: 3554 - DNA, 25 bp, Homo sapiens
atcaagaatagattatttttctgaa

SEQ ID NO: 3555 - DNA, 25 bp, Homo sapiens
tcaagaatagattatttttctgaat

SEQ ID NO: 3556 - DNA, 25 bp, Homo sapiens
caagaatagattatttttctgaata

SEQ ID NO: 3557 - DNA, 25 bp, Homo sapiens
aagaatagattatttttctgaatag

SEQ ID NO: 3558 - DNA, 25 bp, Homo sapiens
agaatagattatttttctgaatagt

SEQ ID NO: 3559 - DNA, 25 bp, Homo sapiens
gaatagattatttttctgaatagtt

SEQ ID NO: 3560 - DNA, 25 bp, Homo sapiens
aatagattatttttctgaatagtta

SEQ ID NO: 3561 - DNA, 25 bp, Homo sapiens
atagattatttttctgaatagttaa

SEQ ID NO: 3562 - DNA, 25 bp, Homo sapiens
tagattatttttctgaatagttaaa

SEQ ID NO: 3563 - DNA, 25 bp, Homo sapiens
agattatttttctgaatagttaaac

SEQ ID NO: 3564 - DNA, 25 bp, Homo sapiens
gattatttttctgaatagttaaacc

SEQ ID NO: 3565 - DNA, 25 bp, Homo sapiens
attatttttctgaatagttaaacct

SEQ ID NO: 3566 - DNA, 25 bp, Homo sapiens
ttatttttctgaatagttaaacctt

SEQ ID NO: 3567 - DNA, 25 bp, Homo sapiens
tatttttctgaatagttaaaccttt

SEQ ID NO: 3568 - DNA, 25 bp, Homo sapiens
atttttctgaatagttaaacctttg

SEQ ID NO: 3569 - DNA, 25 bp, Homo sapiens
tttttctgaatagttaaacctttga

SEQ ID NO: 3570 - DNA, 25 bp, Homo sapiens
ttttctgaatagttaaacctttgat

SEQ ID NO: 3571 - DNA, 25 bp, Homo sapiens
tttctgaatagttaaacctttgatg

SEQ ID NO: 3572 - DNA, 25 bp, Homo sapiens
ttctgaatagttaaacctttgatgg

SEQ ID NO: 3573 - DNA, 25 bp, Homo sapiens
tctgaatagttaaacctttgatggc

SEQ ID NO: 3574 - DNA, 25 bp, Homo sapiens
ctgaatagttaaacctttgatggcc

SEQ ID NO: 3575 - DNA, 25 bp, Homo sapiens
tgaatagttaaacctttgatggcca

SEQ ID NO: 3576 - DNA, 25 bp, Homo sapiens
gaatagttaaacctttgatggccat

SEQ ID NO: 3577 - DNA, 25 bp, Homo sapiens
aatagttaaacctttgatggccata

SEQ ID NO: 3578 - DNA, 25 bp, Homo sapiens
atagttaaacctttgatggccataa

SEQ ID NO: 3579 - DNA, 25 bp, Homo sapiens
tagttaaacctttgatggccataac

SEQ ID NO: 3580 - DNA, 25 bp, Homo sapiens
agttaaacctttgatggccataacc

SEQ ID NO: 3581 - DNA, 25 bp, Homo sapiens
gttaaacctttgatggccataacct

SEQ ID NO: 3582 - DNA, 25 bp, Homo sapiens
ttaaacctttgatggccataacctt

SEQ ID NO: 3583 - DNA, 25 bp, Homo sapiens
taaacctttgatggccataaccttg

SEQ ID NO: 3584 - DNA, 25 bp, Homo sapiens
aaacctttgatggccataaccttga

SEQ ID NO: 3585 - DNA, 25 bp, Homo sapiens
aacctttgatggccataaccttgac

SEQ ID NO: 3586 - DNA, 25 bp, Homo sapiens
acctttgatggccataaccttgacc

SEQ ID NO: 3587 - DNA, 25 bp, Homo sapiens
cctttgatggccataaccttgaccc

SEQ ID NO: 3588 - DNA, 25 bp, Homo sapiens
ctttgatggccataaccttgaccct

SEQ ID NO: 3589 - DNA, 25 bp, Homo sapiens
tttgatggccataaccttgaccctt

SEQ ID NO: 3590 - DNA, 25 bp, Homo sapiens
ttgatggccataaccttgacccttc

SEQ ID NO: 3591 - DNA, 25 bp, Homo sapiens
tgatggccataaccttgacccttca

SEQ ID NO: 3592 - DNA, 25 bp, Homo sapiens
gatggccataaccttgacccttcag

SEQ ID NO: 3593 - DNA, 25 bp, Homo sapiens
atggccataaccttgacccttcaga

SEQ ID NO: 3594 - DNA, 25 bp, Homo sapiens
tggccataaccttgacccttcagac

SEQ ID NO: 3595 - DNA, 25 bp, Homo sapiens
ggccataaccttgacccttcagact

SEQ ID NO: 3596 - DNA, 25 bp, Homo sapiens
gccataaccttgacccttcagactg

SEQ ID NO: 3597 - DNA, 25 bp, Homo sapiens
ccataaccttgacccttcagactgc

SEQ ID NO: 3598 - DNA, 25 bp, Homo sapiens
cataaccttgacccttcagactgca

SEQ ID NO: 3599 - DNA, 25 bp, Homo sapiens
ataaccttgacccttcagactgcag

SEQ ID NO: 3600 - DNA, 25 bp, Homo sapiens
taaccttgacccttcagactgcaga

SEQ ID NO: 3601 - DNA, 25 bp, Homo sapiens
aaccttgacccttcagactgcagag

SEQ ID NO: 3602 - DNA, 25 bp, Homo sapiens
accttgacccttcagactgcagaga

SEQ ID NO: 3603 - DNA, 25 bp, Homo sapiens
ccttgacccttcagactgcagagat

SEQ ID NO: 3604 - DNA, 25 bp, Homo sapiens
cttgacccttcagactgcagagatg

SEQ ID NO: 3605 - DNA, 25 bp, Homo sapiens
ttgacccttcagactgcagagatgc

SEQ ID NO: 3606 - DNA, 25 bp, Homo sapiens
tgacccttcagactgcagagatgca

SEQ ID NO: 3607 - DNA, 25 bp, Homo sapiens
gacccttcagactgcagagatgcag

SEQ ID NO: 3608 - DNA, 25 bp, Homo sapiens
acccttcagactgcagagatgcagg

SEQ ID NO: 3609 - DNA, 25 bp, Homo sapiens
cccttcagactgcagagatgcagga

SEQ ID NO: 3610 - DNA, 25 bp, Homo sapiens
ccttcagactgcagagatgcaggaa

SEQ ID NO: 3611 - DNA, 25 bp, Homo sapiens
cttcagactgcagagatgcaggaag

SEQ ID NO: 3612 - DNA, 25 bp, Homo sapiens
ttcagactgcagagatgcaggaagg

SEQ ID NO: 3613 - DNA, 25 bp, Homo sapiens
tcagactgcagagatgcaggaagga

SEQ ID NO: 3614 - DNA, 25 bp, Homo sapiens
cagactgcagagatgcaggaaggac

SEQ ID NO: 3615 - DNA, 25 bp, Homo sapiens
agactgcagagatgcaggaaggact

SEQ ID NO: 3616 - DNA, 25 bp, Homo sapiens
gactgcagagatgcaggaaggactt

SEQ ID NO: 3617 - DNA, 25 bp, Homo sapiens
actgcagagatgcaggaaggacttc

SEQ ID NO: 3618 - DNA, 25 bp, Homo sapiens
ctgcagagatgcaggaaggacttct

SEQ ID NO: 3619 - DNA, 25 bp, Homo sapiens
tgcagagatgcaggaaggacttctg

SEQ ID NO: 3620 - DNA, 25 bp, Homo sapiens
gcagagatgcaggaaggacttctgg

SEQ ID NO: 3621 - DNA, 25 bp, Homo sapiens
cagagatgcaggaaggacttctggc

SEQ ID NO: 3622 - DNA, 25 bp, Homo sapiens
agagatgcaggaaggacttctggca

SEQ ID NO: 3623 - DNA, 25 bp, Homo sapiens
gagatgcaggaaggacttctggcag

SEQ ID NO: 3624 - DNA, 25 bp, Homo sapiens
agatgcaggaaggacttctggcagt

SEQ ID NO: 3625 - DNA, 25 bp, Homo sapiens
gatgcaggaaggacttctggcagtg

SEQ ID NO: 3626 - DNA, 25 bp, Homo sapiens
atgcaggaaggacttctggcagtga

SEQ ID NO: 3627 - DNA, 25 bp, Homo sapiens
tgcaggaaggacttctggcagtgaa

SEQ ID NO: 3628 - DNA, 25 bp, Homo sapiens
gcaggaaggacttctggcagtgaag

SEQ ID NO: 3629 - DNA, 25 bp, Homo sapiens
caggaaggacttctggcagtgaagg

SEQ ID NO: 3630 - DNA, 25 bp, Homo sapiens
aggaaggacttctggcagtgaaggt

SEQ ID NO: 3631 - DNA, 25 bp, Homo sapiens
ggaaggacttctggcagtgaaggta

SEQ ID NO: 3632 - DNA, 25 bp, Homo sapiens
gaaggacttctggcagtgaaggtaa

SEQ ID NO: 3633 - DNA, 25 bp, Homo sapiens
aaggacttctggcagtgaaggtaaa

SEQ ID NO: 3634 - DNA, 25 bp, Homo sapiens
aggacttctggcagtgaaggtaaag

SEQ ID NO: 3635 - DNA, 25 bp, Homo sapiens
ggacttctggcagtgaaggtaaagg

SEQ ID NO: 3636 - DNA, 25 bp, Homo sapiens
gacttctggcagtgaaggtaaagga

SEQ ID NO: 3637 - DNA, 25 bp, Homo sapiens
acttctggcagtgaaggtaaaggag

SEQ ID NO: 3638 - DNA, 25 bp, Homo sapiens
cttctggcagtgaaggtaaaggagg

SEQ ID NO: 3639 - DNA, 25 bp, Homo sapiens
ttctggcagtgaaggtaaaggagga

SEQ ID NO: 3640 - DNA, 25 bp, Homo sapiens
tctggcagtgaaggtaaaggaggaa

SEQ ID NO: 3641 - DNA, 25 bp, Homo sapiens
ctggcagtgaaggtaaaggaggaag

SEQ ID NO: 3642 - DNA, 25 bp, Homo sapiens
tggcagtgaaggtaaaggaggaaga

SEQ ID NO: 3643 - DNA, 25 bp, Homo sapiens
ggcagtgaaggtaaaggaggaagag

SEQ ID NO: 3644 - DNA, 25 bp, Homo sapiens
gcagtgaaggtaaaggaggaagagg

SEQ ID NO: 3645 - DNA, 25 bp, Homo sapiens
cagtgaaggtaaaggaggaagagga

SEQ ID NO: 3646 - DNA, 25 bp, Homo sapiens
agtgaaggtaaaggaggaagaggag

SEQ ID NO: 3647 - DNA, 25 bp, Homo sapiens
gtgaaggtaaaggaggaagaggagg

SEQ ID NO: 3648 - DNA, 25 bp, Homo sapiens
tgaaggtaaaggaggaagaggagga

SEQ ID NO: 3649 - DNA, 25 bp, Homo sapiens
gaaggtaaaggaggaagaggaggaa

SEQ ID NO: 3650 - DNA, 25 bp, Homo sapiens
aaggtaaaggaggaagaggaggaac

SEQ ID NO: 3651 - DNA, 25 bp, Homo sapiens
aggtaaaggaggaagaggaggaaca

SEQ ID NO: 3652 - DNA, 25 bp, Homo sapiens
ggtaaaggaggaagaggaggaacat

SEQ ID NO: 3653 - DNA, 25 bp, Homo sapiens
gtaaaggaggaagaggaggaacatt

SEQ ID NO: 3654 - DNA, 25 bp, Homo sapiens
taaaggaggaagaggaggaacattc

SEQ ID NO: 3655 - DNA, 25 bp, Homo sapiens
aaaggaggaagaggaggaacattcc

SEQ ID NO: 3656 - DNA, 25 bp, Homo sapiens
aaggaggaagaggaggaacattcct

SEQ ID NO: 3657 - DNA, 25 bp, Homo sapiens
aggaggaagaggaggaacattcctg

SEQ ID NO: 3658 - DNA, 25 bp, Homo sapiens
ggaggaagaggaggaacattcctgt

SEQ ID NO: 3659 - DNA, 25 bp, Homo sapiens
gaggaagaggaggaacattcctgtg

SEQ ID NO: 3660 - DNA, 25 bp, Homo sapiens
aggaagaggaggaacattcctgtgg

SEQ ID NO: 3661 - DNA, 25 bp, Homo sapiens
ggaagaggaggaacattcctgtggg

SEQ ID NO: 3662 - DNA, 25 bp, Homo sapiens
gaagaggaggaacattcctgtgggc

SEQ ID NO: 3663 - DNA, 25 bp, Homo sapiens
aagaggaggaacattcctgtgggcc

SEQ ID NO: 3664 - DNA, 25 bp, Homo sapiens
agaggaggaacattcctgtgggcca

SEQ ID NO: 3665 - DNA, 25 bp, Homo sapiens
gaggaggaacattcctgtgggccag

SEQ ID NO: 3666 - DNA, 25 bp, Homo sapiens
aggaggaacattcctgtgggccaga

SEQ ID NO: 3667 - DNA, 25 bp, Homo sapiens
ggaggaacattcctgtgggccagaa

SEQ ID NO: 3668 - DNA, 25 bp, Homo sapiens
gaggaacattcctgtgggccagaat

SEQ ID NO: 3669 - DNA, 25 bp, Homo sapiens
aggaacattcctgtgggccagaatc

SEQ ID NO: 3670 - DNA, 25 bp, Homo sapiens
ggaacattcctgtgggccagaatca

SEQ ID NO: 3671 - DNA, 25 bp, Homo sapiens
gaacattcctgtgggccagaatcag

SEQ ID NO: 3672 - DNA, 25 bp, Homo sapiens
aacattcctgtgggccagaatcagg

SEQ ID NO: 3673 - DNA, 25 bp, Homo sapiens
acattcctgtgggccagaatcaggc

SEQ ID NO: 3674 - DNA, 25 bp, Homo sapiens
cattcctgtgggccagaatcaggcc

SEQ ID NO: 3675 - DNA, 25 bp, Homo sapiens
attcctgtgggccagaatcaggcct

SEQ ID NO: 3676 - DNA, 25 bp, Homo sapiens
ttcctgtgggccagaatcaggcctg

SEQ ID NO: 3677 - DNA, 25 bp, Homo sapiens
tcctgtgggccagaatcaggcctgt

SEQ ID NO: 3678 - DNA, 25 bp, Homo sapiens
cctgtgggccagaatcaggcctgtc

SEQ ID NO: 3679 - DNA, 25 bp, Homo sapiens
ctgtgggccagaatcaggcctgtca

SEQ ID NO: 3680 - DNA, 25 bp, Homo sapiens
tgtgggccagaatcaggcctgtcaa

SEQ ID NO: 3681 - DNA, 25 bp, Homo sapiens
gtgggccagaatcaggcctgtcaag

SEQ ID NO: 3682 - DNA, 25 bp, Homo sapiens
tgggccagaatcaggcctgtcaaga

SEQ ID NO: 3683 - DNA, 25 bp, Homo sapiens
gggccagaatcaggcctgtcaagaa

SEQ ID NO: 3684 - DNA, 25 bp, Homo sapiens
ggccagaatcaggcctgtcaagaaa

SEQ ID NO: 3685 - DNA, 25 bp, Homo sapiens
gccagaatcaggcctgtcaagaaat

SEQ ID NO: 3686 - DNA, 25 bp, Homo sapiens
ccagaatcaggcctgtcaagaaata

SEQ ID NO: 3687 - DNA, 25 bp, Homo sapiens
cagaatcaggcctgtcaagaaataa

SEQ ID NO: 3688 - DNA, 25 bp, Homo sapiens
agaatcaggcctgtcaagaaataac

SEQ ID NO: 3689 - DNA, 25 bp, Homo sapiens
gaatcaggcctgtcaagaaataacc

SEQ ID NO: 3690 - DNA, 25 bp, Homo sapiens
aatcaggcctgtcaagaaataaccc

SEQ ID NO: 3691 - DNA, 25 bp, Homo sapiens
atcaggcctgtcaagaaataaccct

SEQ ID NO: 3692 - DNA, 25 bp, Homo sapiens
tcaggcctgtcaagaaataaccctc

SEQ ID NO: 3693 - DNA, 25 bp, Homo sapiens
caggcctgtcaagaaataaccctca

SEQ ID NO: 3694 - DNA, 25 bp, Homo sapiens
aggcctgtcaagaaataaccctcat

SEQ ID NO: 3695 - DNA, 25 bp, Homo sapiens
ggcctgtcaagaaataaccctcata

SEQ ID NO: 3696 - DNA, 25 bp, Homo sapiens
gcctgtcaagaaataaccctcatac

SEQ ID NO: 3697 - DNA, 25 bp, Homo sapiens
cctgtcaagaaataaccctcatacc

SEQ ID NO: 3698 - DNA, 25 bp, Homo sapiens
ctgtcaagaaataaccctcatacca

SEQ ID NO: 3699 - DNA, 25 bp, Homo sapiens
tgtcaagaaataaccctcataccag

SEQ ID NO: 3700 - DNA, 25 bp, Homo sapiens
gtcaagaaataaccctcataccaga

SEQ ID NO: 3701 - DNA, 25 bp, Homo sapiens
tcaagaaataaccctcataccagag

SEQ ID NO: 3702 - DNA, 25 bp, Homo sapiens
caagaaataaccctcataccagaga

SEQ ID NO: 3703 - DNA, 25 bp, Homo sapiens
aagaaataaccctcataccagagag

SEQ ID NO: 3704 - DNA, 25 bp, Homo sapiens
agaaataaccctcataccagagaga

SEQ ID NO: 3705 - DNA, 25 bp, Homo sapiens
gaaataaccctcataccagagagat

SEQ ID NO: 3706 - DNA, 25 bp, Homo sapiens
aaataaccctcataccagagagatc

SEQ ID NO: 3707 - DNA, 25 bp, Homo sapiens
aataaccctcataccagagagatct

SEQ ID NO: 3708 - DNA, 25 bp, Homo sapiens
ataaccctcataccagagagatctt

SEQ ID NO: 3709 - DNA, 25 bp, Homo sapiens
taaccctcataccagagagatcttt

SEQ ID NO: 3710 - DNA, 25 bp, Homo sapiens
aaccctcataccagagagatctttc

SEQ ID NO: 3711 - DNA, 25 bp, Homo sapiens
accctcataccagagagatctttcg

SEQ ID NO: 3712 - DNA, 25 bp, Homo sapiens
ccctcataccagagagatctttcgt

SEQ ID NO: 3713 - DNA, 25 bp, Homo sapiens
cctcataccagagagatctttcgta

SEQ ID NO: 3714 - DNA, 25 bp, Homo sapiens
ctcataccagagagatctttcgtag

SEQ ID NO: 3715 - DNA, 25 bp, Homo sapiens
tcataccagagagatctttcgtaga

SEQ ID NO: 3716 - DNA, 25 bp, Homo sapiens
cataccagagagatctttcgtagac

SEQ ID NO: 3717 - DNA, 25 bp, Homo sapiens
ataccagagagatctttcgtagacg

SEQ ID NO: 3718 - DNA, 25 bp, Homo sapiens
taccagagagatctttcgtagacgc

SEQ ID NO: 3719 - DNA, 25 bp, Homo sapiens
accagagagatctttcgtagacgct

SEQ ID NO: 3720 - DNA, 25 bp, Homo sapiens
ccagagagatctttcgtagacgctt

SEQ ID NO: 3721 - DNA, 25 bp, Homo sapiens
cagagagatctttcgtagacgcttc

SEQ ID NO: 3722 - DNA, 25 bp, Homo sapiens
agagagatctttcgtagacgcttca

SEQ ID NO: 3723 - DNA, 25 bp, Homo sapiens
gagagatctttcgtagacgcttcag

SEQ ID NO: 3724 - DNA, 25 bp, Homo sapiens
agagatctttcgtagacgcttcagg

SEQ ID NO: 3725 - DNA, 25 bp, Homo sapiens
gagatctttcgtagacgcttcaggc

SEQ ID NO: 3726 - DNA, 25 bp, Homo sapiens
agatctttcgtagacgcttcaggca

SEQ ID NO: 3727 - DNA, 25 bp, Homo sapiens
gatctttcgtagacgcttcaggcag

SEQ ID NO: 3728 - DNA, 25 bp, Homo sapiens
atctttcgtagacgcttcaggcagt

SEQ ID NO: 3729 - DNA, 25 bp, Homo sapiens
tctttcgtagacgcttcaggcagtt

SEQ ID NO: 3730 - DNA, 25 bp, Homo sapiens
ctttcgtagacgcttcaggcagttc

SEQ ID NO: 3731 - DNA, 25 bp, Homo sapiens
tttcgtagacgcttcaggcagttct

SEQ ID NO: 3732 - DNA, 25 bp, Homo sapiens
ttcgtagacgcttcaggcagttctg

SEQ ID NO: 3733 - DNA, 25 bp, Homo sapiens
tcgtagacgcttcaggcagttctgc

SEQ ID NO: 3734 - DNA, 25 bp, Homo sapiens
cgtagacgcttcaggcagttctgct

SEQ ID NO: 3735 - DNA, 25 bp, Homo sapiens
gtagacgcttcaggcagttctgcta

SEQ ID NO: 3736 - DNA, 25 bp, Homo sapiens
tagacgcttcaggcagttctgctat

SEQ ID NO: 3737 - DNA, 25 bp, Homo sapiens
agacgcttcaggcagttctgctatc

SEQ ID NO: 3738 - DNA, 25 bp, Homo sapiens
gacgcttcaggcagttctgctatca

SEQ ID NO: 3739 - DNA, 25 bp, Homo sapiens
acgcttcaggcagttctgctatcag

SEQ ID NO: 3740 - DNA, 25 bp, Homo sapiens
cgcttcaggcagttctgctatcagg

SEQ ID NO: 3741 - DNA, 25 bp, Homo sapiens
gcttcaggcagttctgctatcagga

SEQ ID NO: 3742 - DNA, 25 bp, Homo sapiens
cttcaggcagttctgctatcaggag

SEQ ID NO: 3743 - DNA, 25 bp, Homo sapiens
ttcaggcagttctgctatcaggagt

SEQ ID NO: 3744 - DNA, 25 bp, Homo sapiens
tcaggcagttctgctatcaggagtc

SEQ ID NO: 3745 - DNA, 25 bp, Homo sapiens
caggcagttctgctatcaggagtcc

SEQ ID NO: 3746 - DNA, 25 bp, Homo sapiens
aggcagttctgctatcaggagtccc

SEQ ID NO: 3747 - DNA, 25 bp, Homo sapiens
ggcagttctgctatcaggagtcccc

SEQ ID NO: 3748 - DNA, 25 bp, Homo sapiens
gcagttctgctatcaggagtcccct

SEQ ID NO: 3749 - DNA, 25 bp, Homo sapiens
cagttctgctatcaggagtcccctg

SEQ ID NO: 3750 - DNA, 25 bp, Homo sapiens
agttctgctatcaggagtcccctgg

SEQ ID NO: 3751 - DNA, 25 bp, Homo sapiens
gttctgctatcaggagtcccctggg

SEQ ID NO: 3752 - DNA, 25 bp, Homo sapiens
ttctgctatcaggagtcccctgggc

SEQ ID NO: 3753 - DNA, 25 bp, Homo sapiens
tctgctatcaggagtcccctgggcc

SEQ ID NO: 3754 - DNA, 25 bp, Homo sapiens
ctgctatcaggagtcccctgggccc

SEQ ID NO: 3755 - DNA, 25 bp, Homo sapiens
tgctatcaggagtcccctgggcccc

SEQ ID NO: 3756 - DNA, 25 bp, Homo sapiens
gctatcaggagtcccctgggccccg

SEQ ID NO: 3757 - DNA, 25 bp, Homo sapiens
ctatcaggagtcccctgggccccgg

SEQ ID NO: 3758 - DNA, 25 bp, Homo sapiens
tatcaggagtcccctgggccccggg

SEQ ID NO: 3759 - DNA, 25 bp, Homo sapiens
atcaggagtcccctgggccccggga

SEQ ID NO: 3760 - DNA, 25 bp, Homo sapiens
tcaggagtcccctgggccccgggag

SEQ ID NO: 3761 - DNA, 25 bp, Homo sapiens
caggagtcccctgggccccgggagg

SEQ ID NO: 3762 - DNA, 25 bp, Homo sapiens
aggagtcccctgggccccgggaggc

SEQ ID NO: 3763 - DNA, 25 bp, Homo sapiens
ggagtcccctgggccccgggaggct

SEQ ID NO: 3764 - DNA, 25 bp, Homo sapiens
gagtcccctgggccccgggaggctc

SEQ ID NO: 3765 - DNA, 25 bp, Homo sapiens
agtcccctgggccccgggaggctct

SEQ ID NO: 3766 - DNA, 25 bp, Homo sapiens
gtcccctgggccccgggaggctctt

SEQ ID NO: 3767 - DNA, 25 bp, Homo sapiens
tcccctgggccccgggaggctcttc

SEQ ID NO: 3768 - DNA, 25 bp, Homo sapiens
cccctgggccccgggaggctcttca

SEQ ID NO: 3769 - DNA, 25 bp, Homo sapiens
ccctgggccccgggaggctcttcaa

SEQ ID NO: 3770 - DNA, 25 bp, Homo sapiens
cctgggccccgggaggctcttcaaa

SEQ ID NO: 3771 - DNA, 25 bp, Homo sapiens
ctgggccccgggaggctcttcaaag

SEQ ID NO: 3772 - DNA, 25 bp, Homo sapiens
tgggccccgggaggctcttcaaaga

SEQ ID NO: 3773 - DNA, 25 bp, Homo sapiens
gggccccgggaggctcttcaaagac

SEQ ID NO: 3774 - DNA, 25 bp, Homo sapiens
ggccccgggaggctcttcaaagact

SEQ ID NO: 3775 - DNA, 25 bp, Homo sapiens
gccccgggaggctcttcaaagactc

SEQ ID NO: 3776 - DNA, 25 bp, Homo sapiens
ccccgggaggctcttcaaagactcc

SEQ ID NO: 3777 - DNA, 25 bp, Homo sapiens
cccgggaggctcttcaaagactcca

SEQ ID NO: 3778 - DNA, 25 bp, Homo sapiens
ccgggaggctcttcaaagactccag

SEQ ID NO: 3779 - DNA, 25 bp, Homo sapiens
cgggaggctcttcaaagactccagg

SEQ ID NO: 3780 - DNA, 25 bp, Homo sapiens
gggaggctcttcaaagactccagga

SEQ ID NO: 3781 - DNA, 25 bp, Homo sapiens
ggaggctcttcaaagactccaggag

SEQ ID NO: 3782 - DNA, 25 bp, Homo sapiens
gaggctcttcaaagactccaggagc

SEQ ID NO: 3783 - DNA, 25 bp, Homo sapiens
aggctcttcaaagactccaggagct

SEQ ID NO: 3784 - DNA, 25 bp, Homo sapiens
ggctcttcaaagactccaggagctc

SEQ ID NO: 3785 - DNA, 25 bp, Homo sapiens
gctcttcaaagactccaggagctct

SEQ ID NO: 3786 - DNA, 25 bp, Homo sapiens
ctcttcaaagactccaggagctctg

SEQ ID NO: 3787 - DNA, 25 bp, Homo sapiens
tcttcaaagactccaggagctctgc

SEQ ID NO: 3788 - DNA, 25 bp, Homo sapiens
cttcaaagactccaggagctctgcc

SEQ ID NO: 3789 - DNA, 25 bp, Homo sapiens
ttcaaagactccaggagctctgcca

SEQ ID NO: 3790 - DNA, 25 bp, Homo sapiens
tcaaagactccaggagctctgccat

SEQ ID NO: 3791 - DNA, 25 bp, Homo sapiens
caaagactccaggagctctgccatc

SEQ ID NO: 3792 - DNA, 25 bp, Homo sapiens
aaagactccaggagctctgccatca

SEQ ID NO: 3793 - DNA, 25 bp, Homo sapiens
aagactccaggagctctgccatcag

SEQ ID NO: 3794 - DNA, 25 bp, Homo sapiens
agactccaggagctctgccatcagt

SEQ ID NO: 3795 - DNA, 25 bp, Homo sapiens
gactccaggagctctgccatcagtg

SEQ ID NO: 3796 - DNA, 25 bp, Homo sapiens
actccaggagctctgccatcagtgg

SEQ ID NO: 3797 - DNA, 25 bp, Homo sapiens
ctccaggagctctgccatcagtggc

SEQ ID NO: 3798 - DNA, 25 bp, Homo sapiens
tccaggagctctgccatcagtggct

SEQ ID NO: 3799 - DNA, 25 bp, Homo sapiens
ccaggagctctgccatcagtggctg

SEQ ID NO: 3800 - DNA, 25 bp, Homo sapiens
caggagctctgccatcagtggctga

SEQ ID NO: 3801 - DNA, 25 bp, Homo sapiens
aggagctctgccatcagtggctgag

SEQ ID NO: 3802 - DNA, 25 bp, Homo sapiens
ggagctctgccatcagtggctgaga

SEQ ID NO: 3803 - DNA, 25 bp, Homo sapiens
gagctctgccatcagtggctgagac

SEQ ID NO: 3804 - DNA, 25 bp, Homo sapiens
agctctgccatcagtggctgagacc

SEQ ID NO: 3805 - DNA, 25 bp, Homo sapiens
gctctgccatcagtggctgagacca

SEQ ID NO: 3806 - DNA, 25 bp, Homo sapiens
ctctgccatcagtggctgagaccag

SEQ ID NO: 3807 - DNA, 25 bp, Homo sapiens
tctgccatcagtggctgagaccaga

SEQ ID NO: 3808 - DNA, 25 bp, Homo sapiens
ctgccatcagtggctgagaccagag

SEQ ID NO: 3809 - DNA, 25 bp, Homo sapiens
tgccatcagtggctgagaccagaga

SEQ ID NO: 3810 - DNA, 25 bp, Homo sapiens
gccatcagtggctgagaccagagat

SEQ ID NO: 3811 - DNA, 25 bp, Homo sapiens
ccatcagtggctgagaccagagatg

SEQ ID NO: 3812 - DNA, 25 bp, Homo sapiens
catcagtggctgagaccagagatgc

SEQ ID NO: 3813 - DNA, 25 bp, Homo sapiens
atcagtggctgagaccagagatgca

SEQ ID NO: 3814 - DNA, 25 bp, Homo sapiens
tcagtggctgagaccagagatgcac

SEQ ID NO: 3815 - DNA, 25 bp, Homo sapiens
cagtggctgagaccagagatgcaca

SEQ ID NO: 3816 - DNA, 25 bp, Homo sapiens
agtggctgagaccagagatgcacac

SEQ ID NO: 3817 - DNA, 25 bp, Homo sapiens
gtggctgagaccagagatgcacacc

SEQ ID NO: 3818 - DNA, 25 bp, Homo sapiens
tggctgagaccagagatgcacacca

SEQ ID NO: 3819 - DNA, 25 bp, Homo sapiens
ggctgagaccagagatgcacaccaa

SEQ ID NO: 3820 - DNA, 25 bp, Homo sapiens
gctgagaccagagatgcacaccaag

SEQ ID NO: 3821 - DNA, 25 bp, Homo sapiens
ctgagaccagagatgcacaccaagg

SEQ ID NO: 3822 - DNA, 25 bp, Homo sapiens
tgagaccagagatgcacaccaagga

SEQ ID NO: 3823 - DNA, 25 bp, Homo sapiens
gagaccagagatgcacaccaaggag

SEQ ID NO: 3824 - DNA, 25 bp, Homo sapiens
agaccagagatgcacaccaaggagc

SEQ ID NO: 3825 - DNA, 25 bp, Homo sapiens
gaccagagatgcacaccaaggagca

SEQ ID NO: 3826 - DNA, 25 bp, Homo sapiens
accagagatgcacaccaaggagcag

SEQ ID NO: 3827 - DNA, 25 bp, Homo sapiens
ccagagatgcacaccaaggagcaga

SEQ ID NO: 3828 - DNA, 25 bp, Homo sapiens
cagagatgcacaccaaggagcagat

SEQ ID NO: 3829 - DNA, 25 bp, Homo sapiens
agagatgcacaccaaggagcagatc

SEQ ID NO: 3830 - DNA, 25 bp, Homo sapiens
gagatgcacaccaaggagcagatcc

SEQ ID NO: 3831 - DNA, 25 bp, Homo sapiens
agatgcacaccaaggagcagatcct

SEQ ID NO: 3832 - DNA, 25 bp, Homo sapiens
gatgcacaccaaggagcagatccta

SEQ ID NO: 3833 - DNA, 25 bp, Homo sapiens
atgcacaccaaggagcagatcctag

SEQ ID NO: 3834 - DNA, 25 bp, Homo sapiens
tgcacaccaaggagcagatcctaga

SEQ ID NO: 3835 - DNA, 25 bp, Homo sapiens
gcacaccaaggagcagatcctagag

SEQ ID NO: 3836 - DNA, 25 bp, Homo sapiens
cacaccaaggagcagatcctagagc

SEQ ID NO: 3837 - DNA, 25 bp, Homo sapiens
acaccaaggagcagatcctagagct

SEQ ID NO: 3838 - DNA, 25 bp, Homo sapiens
caccaaggagcagatcctagagctg

SEQ ID NO: 3839 - DNA, 25 bp, Homo sapiens
accaaggagcagatcctagagctgc

SEQ ID NO: 3840 - DNA, 25 bp, Homo sapiens
ccaaggagcagatcctagagctgct

SEQ ID NO: 3841 - DNA, 25 bp, Homo sapiens
caaggagcagatcctagagctgctg

SEQ ID NO: 3842 - DNA, 25 bp, Homo sapiens
aaggagcagatcctagagctgctgg

SEQ ID NO: 3843 - DNA, 25 bp, Homo sapiens
aggagcagatcctagagctgctggt

SEQ ID NO: 3844 - DNA, 25 bp, Homo sapiens
ggagcagatcctagagctgctggtg

SEQ ID NO: 3845 - DNA, 25 bp, Homo sapiens
gagcagatcctagagctgctggtgc

SEQ ID NO: 3846 - DNA, 25 bp, Homo sapiens
agcagatcctagagctgctggtgct

SEQ ID NO: 3847 - DNA, 25 bp, Homo sapiens
gcagatcctagagctgctggtgctg

SEQ ID NO: 3848 - DNA, 25 bp, Homo sapiens
cagatcctagagctgctggtgctgg

SEQ ID NO: 3849 - DNA, 25 bp, Homo sapiens
agatcctagagctgctggtgctgga

SEQ ID NO: 3850 - DNA, 25 bp, Homo sapiens
gatcctagagctgctggtgctggag

SEQ ID NO: 3851 - DNA, 25 bp, Homo sapiens
atcctagagctgctggtgctggagc

SEQ ID NO: 3852 - DNA, 25 bp, Homo sapiens
tcctagagctgctggtgctggagca

SEQ ID NO: 3853 - DNA, 25 bp, Homo sapiens
cctagagctgctggtgctggagcag

SEQ ID NO: 3854 - DNA, 25 bp, Homo sapiens
ctagagctgctggtgctggagcagt

SEQ ID NO: 3855 - DNA, 25 bp, Homo sapiens
tagagctgctggtgctggagcagtt

SEQ ID NO: 3856 - DNA, 25 bp, Homo sapiens
agagctgctggtgctggagcagttc

SEQ ID NO: 3857 - DNA, 25 bp, Homo sapiens
gagctgctggtgctggagcagttcc

SEQ ID NO: 3858 - DNA, 25 bp, Homo sapiens
agctgctggtgctggagcagttcct

SEQ ID NO: 3859 - DNA, 25 bp, Homo sapiens
gctgctggtgctggagcagttcctg

SEQ ID NO: 3860 - DNA, 25 bp, Homo sapiens
ctgctggtgctggagcagttcctga

SEQ ID NO: 3861 - DNA, 25 bp, Homo sapiens
tgctggtgctggagcagttcctgac

SEQ ID NO: 3862 - DNA, 25 bp, Homo sapiens
gctggtgctggagcagttcctgact

SEQ ID NO: 3863 - DNA, 25 bp, Homo sapiens
ctggtgctggagcagttcctgacta

SEQ ID NO: 3864 - DNA, 25 bp, Homo sapiens
tggtgctggagcagttcctgactat

SEQ ID NO: 3865 - DNA, 25 bp, Homo sapiens
ggtgctggagcagttcctgactatc

SEQ ID NO: 3866 - DNA, 25 bp, Homo sapiens
gtgctggagcagttcctgactatcc

SEQ ID NO: 3867 - DNA, 25 bp, Homo sapiens
tgctggagcagttcctgactatcct

SEQ ID NO: 3868 - DNA, 25 bp, Homo sapiens
gctggagcagttcctgactatcctg

SEQ ID NO: 3869 - DNA, 25 bp, Homo sapiens
ctggagcagttcctgactatcctgc

SEQ ID NO: 3870 - DNA, 25 bp, Homo sapiens
tggagcagttcctgactatcctgcc

SEQ ID NO: 3871 - DNA, 25 bp, Homo sapiens
ggagcagttcctgactatcctgcct

SEQ ID NO: 3872 - DNA, 25 bp, Homo sapiens
gagcagttcctgactatcctgcctg

SEQ ID NO: 3873 - DNA, 25 bp, Homo sapiens
agcagttcctgactatcctgcctga

SEQ ID NO: 3874 - DNA, 25 bp, Homo sapiens
gcagttcctgactatcctgcctgag

SEQ ID NO: 3875 - DNA, 25 bp, Homo sapiens
cagttcctgactatcctgcctgagg

SEQ ID NO: 3876 - DNA, 25 bp, Homo sapiens
agttcctgactatcctgcctgagga

SEQ ID NO: 3877 - DNA, 25 bp, Homo sapiens
gttcctgactatcctgcctgaggag

SEQ ID NO: 3878 - DNA, 25 bp, Homo sapiens
ttcctgactatcctgcctgaggagc

SEQ ID NO: 3879 - DNA, 25 bp, Homo sapiens
tcctgactatcctgcctgaggagct

SEQ ID NO: 3880 - DNA, 25 bp, Homo sapiens
cctgactatcctgcctgaggagctc

SEQ ID NO: 3881 - DNA, 25 bp, Homo sapiens
ctgactatcctgcctgaggagctcc

SEQ ID NO: 3882 - DNA, 25 bp, Homo sapiens
tgactatcctgcctgaggagctcca

SEQ ID NO: 3883 - DNA, 25 bp, Homo sapiens
gactatcctgcctgaggagctccag

SEQ ID NO: 3884 - DNA, 25 bp, Homo sapiens
actatcctgcctgaggagctccagg

SEQ ID NO: 3885 - DNA, 25 bp, Homo sapiens
ctatcctgcctgaggagctccaggc

SEQ ID NO: 3886 - DNA, 25 bp, Homo sapiens
tatcctgcctgaggagctccaggcc

SEQ ID NO: 3887 - DNA, 25 bp, Homo sapiens
atcctgcctgaggagctccaggcct

SEQ ID NO: 3888 - DNA, 25 bp, Homo sapiens
tcctgcctgaggagctccaggcctg

SEQ ID NO: 3889 - DNA, 25 bp, Homo sapiens
cctgcctgaggagctccaggcctgg

SEQ ID NO: 3890 - DNA, 25 bp, Homo sapiens
ctgcctgaggagctccaggcctggg

SEQ ID NO: 3891 - DNA, 25 bp, Homo sapiens
tgcctgaggagctccaggcctgggt

SEQ ID NO: 3892 - DNA, 25 bp, Homo sapiens
gcctgaggagctccaggcctgggtc

SEQ ID NO: 3893 - DNA, 25 bp, Homo sapiens
cctgaggagctccaggcctgggtca

SEQ ID NO: 3894 - DNA, 25 bp, Homo sapiens
ctgaggagctccaggcctgggtcag

SEQ ID NO: 3895 - DNA, 25 bp, Homo sapiens
tgaggagctccaggcctgggtcaga

SEQ ID NO: 3896 - DNA, 25 bp, Homo sapiens
gaggagctccaggcctgggtcagac

SEQ ID NO: 3897 - DNA, 25 bp, Homo sapiens
aggagctccaggcctgggtcagaca

SEQ ID NO: 3898 - DNA, 25 bp, Homo sapiens
ggagctccaggcctgggtcagacag

SEQ ID NO: 3899 - DNA, 25 bp, Homo sapiens
gagctccaggcctgggtcagacagc

SEQ ID NO: 3900 - DNA, 25 bp, Homo sapiens
agctccaggcctgggtcagacagca

SEQ ID NO: 3901 - DNA, 25 bp, Homo sapiens
gctccaggcctgggtcagacagcac

SEQ ID NO: 3902 - DNA, 25 bp, Homo sapiens
ctccaggcctgggtcagacagcacc

SEQ ID NO: 3903 - DNA, 25 bp, Homo sapiens
tccaggcctgggtcagacagcaccg

SEQ ID NO: 3904 - DNA, 25 bp, Homo sapiens
ccaggcctgggtcagacagcaccgt

SEQ ID NO: 3905 - DNA, 25 bp, Homo sapiens
caggcctgggtcagacagcaccgtc

SEQ ID NO: 3906 - DNA, 25 bp, Homo sapiens
aggcctgggtcagacagcaccgtcc

SEQ ID NO: 3907 - DNA, 25 bp, Homo sapiens
ggcctgggtcagacagcaccgtcct

SEQ ID NO: 3908 - DNA, 25 bp, Homo sapiens
gcctgggtcagacagcaccgtcctg

SEQ ID NO: 3909 - DNA, 25 bp, Homo sapiens
cctgggtcagacagcaccgtcctgt

SEQ ID NO: 3910 - DNA, 25 bp, Homo sapiens
ctgggtcagacagcaccgtcctgtg

SEQ ID NO: 3911 - DNA, 25 bp, Homo sapiens
tgggtcagacagcaccgtcctgtga

SEQ ID NO: 3912 - DNA, 25 bp, Homo sapiens
gggtcagacagcaccgtcctgtgag

SEQ ID NO: 3913 - DNA, 25 bp, Homo sapiens
ggtcagacagcaccgtcctgtgagt

SEQ ID NO: 3914 - DNA, 25 bp, Homo sapiens
gtcagacagcaccgtcctgtgagtg

SEQ ID NO: 3915 - DNA, 25 bp, Homo sapiens
tcagacagcaccgtcctgtgagtgg

SEQ ID NO: 3916 - DNA, 25 bp, Homo sapiens
cagacagcaccgtcctgtgagtgga

SEQ ID NO: 3917 - DNA, 25 bp, Homo sapiens
agacagcaccgtcctgtgagtggag

SEQ ID NO: 3918 - DNA, 25 bp, Homo sapiens
gacagcaccgtcctgtgagtggaga

SEQ ID NO: 3919 - DNA, 25 bp, Homo sapiens
acagcaccgtcctgtgagtggagag

SEQ ID NO: 3920 - DNA, 25 bp, Homo sapiens
cagcaccgtcctgtgagtggagagg

SEQ ID NO: 3921 - DNA, 25 bp, Homo sapiens
agcaccgtcctgtgagtggagagga

SEQ ID NO: 3922 - DNA, 25 bp, Homo sapiens
gcaccgtcctgtgagtggagaggag

SEQ ID NO: 3923 - DNA, 25 bp, Homo sapiens
caccgtcctgtgagtggagaggagg

SEQ ID NO: 3924 - DNA, 25 bp, Homo sapiens
accgtcctgtgagtggagaggaggc

SEQ ID NO: 3925 - DNA, 25 bp, Homo sapiens
ccgtcctgtgagtggagaggaggca

SEQ ID NO: 3926 - DNA, 25 bp, Homo sapiens
cgtcctgtgagtggagaggaggcag

SEQ ID NO: 3927 - DNA, 25 bp, Homo sapiens
gtcctgtgagtggagaggaggcagt

SEQ ID NO: 3928 - DNA, 25 bp, Homo sapiens
tcctgtgagtggagaggaggcagtg

SEQ ID NO: 3929 - DNA, 25 bp, Homo sapiens
cctgtgagtggagaggaggcagtga

SEQ ID NO: 3930 - DNA, 25 bp, Homo sapiens
ctgtgagtggagaggaggcagtgac

SEQ ID NO: 3931 - DNA, 25 bp, Homo sapiens
tgtgagtggagaggaggcagtgact

SEQ ID NO: 3932 - DNA, 25 bp, Homo sapiens
gtgagtggagaggaggcagtgactg

SEQ ID NO: 3933 - DNA, 25 bp, Homo sapiens
tgagtggagaggaggcagtgactgt

SEQ ID NO: 3934 - DNA, 25 bp, Homo sapiens
gagtggagaggaggcagtgactgtg

SEQ ID NO: 3935 - DNA, 25 bp, Homo sapiens
agtggagaggaggcagtgactgtgc

SEQ ID NO: 3936 - DNA, 25 bp, Homo sapiens
gtggagaggaggcagtgactgtgct

SEQ ID NO: 3937 - DNA, 25 bp, Homo sapiens
tggagaggaggcagtgactgtgctg

SEQ ID NO: 3938 - DNA, 25 bp, Homo sapiens
ggagaggaggcagtgactgtgctgg

SEQ ID NO: 3939 - DNA, 25 bp, Homo sapiens
gagaggaggcagtgactgtgctgga

SEQ ID NO: 3940 - DNA, 25 bp, Homo sapiens
agaggaggcagtgactgtgctggag

SEQ ID NO: 3941 - DNA, 25 bp, Homo sapiens
gaggaggcagtgactgtgctggagg

SEQ ID NO: 3942 - DNA, 25 bp, Homo sapiens
aggaggcagtgactgtgctggagga

SEQ ID NO: 3943 - DNA, 25 bp, Homo sapiens
ggaggcagtgactgtgctggaggat

SEQ ID NO: 3944 - DNA, 25 bp, Homo sapiens
gaggcagtgactgtgctggaggatt

SEQ ID NO: 3945 - DNA, 25 bp, Homo sapiens
aggcagtgactgtgctggaggattt

SEQ ID NO: 3946 - DNA, 25 bp, Homo sapiens
ggcagtgactgtgctggaggatttg

SEQ ID NO: 3947 - DNA, 25 bp, Homo sapiens
gcagtgactgtgctggaggatttgg

SEQ ID NO: 3948 - DNA, 25 bp, Homo sapiens
cagtgactgtgctggaggatttgga

SEQ ID NO: 3949 - DNA, 25 bp, Homo sapiens
agtgactgtgctggaggatttggag

SEQ ID NO: 3950 - DNA, 25 bp, Homo sapiens
gtgactgtgctggaggatttggaga

SEQ ID NO: 3951 - DNA, 25 bp, Homo sapiens
tgactgtgctggaggatttggagag

SEQ ID NO: 3952 - DNA, 25 bp, Homo sapiens
gactgtgctggaggatttggagaga

SEQ ID NO: 3953 - DNA, 25 bp, Homo sapiens
actgtgctggaggatttggagagag

SEQ ID NO: 3954 - DNA, 25 bp, Homo sapiens
ctgtgctggaggatttggagagaga

SEQ ID NO: 3955 - DNA, 25 bp, Homo sapiens
tgtgctggaggatttggagagagag

SEQ ID NO: 3956 - DNA, 25 bp, Homo sapiens
gtgctggaggatttggagagagagc

SEQ ID NO: 3957 - DNA, 25 bp, Homo sapiens
tgctggaggatttggagagagagct

SEQ ID NO: 3958 - DNA, 25 bp, Homo sapiens
gctggaggatttggagagagagctg

SEQ ID NO: 3959 - DNA, 25 bp, Homo sapiens
ctggaggatttggagagagagctgg

SEQ ID NO: 3960 - DNA, 25 bp, Homo sapiens
tggaggatttggagagagagctgga

SEQ ID NO: 3961 - DNA, 25 bp, Homo sapiens
ggaggatttggagagagagctggat

SEQ ID NO: 3962 - DNA, 25 bp, Homo sapiens
gaggatttggagagagagctggatg

SEQ ID NO: 3963 - DNA, 25 bp, Homo sapiens
aggatttggagagagagctggatga

SEQ ID NO: 3964 - DNA, 25 bp, Homo sapiens
ggatttggagagagagctggatgac

SEQ ID NO: 3965 - DNA, 25 bp, Homo sapiens
gatttggagagagagctggatgacc

SEQ ID NO: 3966 - DNA, 25 bp, Homo sapiens
atttggagagagagctggatgaccc

SEQ ID NO: 3967 - DNA, 25 bp, Homo sapiens
tttggagagagagctggatgaccca

SEQ ID NO: 3968 - DNA, 25 bp, Homo sapiens
ttggagagagagctggatgacccag

SEQ ID NO: 3969 - DNA, 25 bp, Homo sapiens
tggagagagagctggatgacccagg

SEQ ID NO: 3970 - DNA, 25 bp, Homo sapiens
ggagagagagctggatgacccagga

SEQ ID NO: 3971 - DNA, 25 bp, Homo sapiens
gagagagagctggatgacccaggag

SEQ ID NO: 3972 - DNA, 25 bp, Homo sapiens
agagagagctggatgacccaggaga

SEQ ID NO: 3973 - DNA, 25 bp, Homo sapiens
gagagagctggatgacccaggagag

SEQ ID NO: 3974 - DNA, 25 bp, Homo sapiens
agagagctggatgacccaggagagc

SEQ ID NO: 3975 - DNA, 25 bp, Homo sapiens
gagagctggatgacccaggagagca

SEQ ID NO: 3976 - DNA, 25 bp, Homo sapiens
agagctggatgacccaggagagcag

SEQ ID NO: 3977 - DNA, 17 bp, Homo sapiens
cgggcttttccatcacc

SEQ ID NO: 3978 - DNA, 17 bp, Homo sapiens
gggcttttccatcacct

SEQ ID NO: 3979 - DNA, 17 bp, Homo sapiens
ggcttttccatcacctc

SEQ ID NO: 3980 - DNA, 17 bp, Homo sapiens
gcttttccatcacctca

SEQ ID NO: 3981 - DNA, 17 bp, Homo sapiens
cttttccatcacctcag

SEQ ID NO: 3982 - DNA, 17 bp, Homo sapiens
ttttccatcacctcaga

SEQ ID NO: 3983 - DNA, 17 bp, Homo sapiens
tttccatcacctcagaa

SEQ ID NO: 3984 - DNA, 17 bp, Homo sapiens
ttccatcacctcagaat

SEQ ID NO: 3985 - DNA, 17 bp, Homo sapiens
tccatcacctcagaatt

SEQ ID NO: 3986 - DNA, 17 bp, Homo sapiens
ccatcacctcagaattc

SEQ ID NO: 3987 - DNA, 17 bp, Homo sapiens
catcacctcagaattca

SEQ ID NO: 3988 - DNA, 17 bp, Homo sapiens
atcacctcagaattcac

SEQ ID NO: 3989 - DNA, 17 bp, Homo sapiens
tcacctcagaattcaca

SEQ ID NO: 3990 - DNA, 17 bp, Homo sapiens
cacctcagaattcacac

SEQ ID NO: 3991 - DNA, 17 bp, Homo sapiens
acctcagaattcacact

SEQ ID NO: 3992 - DNA, 17 bp, Homo sapiens
cctcagaattcacactg

SEQ ID NO: 3993 - DNA, 17 bp, Homo sapiens
ctcagaattcacactgg

SEQ ID NO: 3994 - DNA, 17 bp, Homo sapiens
tcagaattcacactggg

SEQ ID NO: 3995 - DNA, 17 bp, Homo sapiens
cagaattcacactgggg

SEQ ID NO: 3996 - DNA, 17 bp, Homo sapiens
agaattcacactgggga

SEQ ID NO: 3997 - DNA, 17 bp, Homo sapiens
gaattcacactggggag

SEQ ID NO: 3998 - DNA, 17 bp, Homo sapiens
aattcacactggggaga

SEQ ID NO: 3999 - DNA, 17 bp, Homo sapiens
attcacactggggagaa

SEQ ID NO: 4000 - DNA, 17 bp, Homo sapiens
ttcacactggggagaag

SEQ ID NO: 4001 - DNA, 17 bp, Homo sapiens
tcacactggggagaagc

SEQ ID NO: 4002 - DNA, 17 bp, Homo sapiens
cacactggggagaagcc

SEQ ID NO: 4003 - DNA, 17 bp, Homo sapiens
acactggggagaagcct

SEQ ID NO: 4004 - DNA, 17 bp, Homo sapiens
cactggggagaagcctt

SEQ ID NO: 4005 - DNA, 17 bp, Homo sapiens
actggggagaagcctta

SEQ ID NO: 4006 - DNA, 17 bp, Homo sapiens
ctggggagaagccttac

SEQ ID NO: 4007 - DNA, 17 bp, Homo sapiens
tggggagaagccttacc

SEQ ID NO: 4008 - DNA, 17 bp, Homo sapiens
ggggagaagccttacca

SEQ ID NO: 4009 - DNA, 17 bp, Homo sapiens
gggagaagccttaccag

SEQ ID NO: 4010 - DNA, 17 bp, Homo sapiens
ggagaagccttaccagt

SEQ ID NO: 4011 - DNA, 17 bp, Homo sapiens
gagaagccttaccagtg

SEQ ID NO: 4012 - DNA, 17 bp, Homo sapiens
agaagccttaccagtgc

SEQ ID NO: 4013 - DNA, 17 bp, Homo sapiens
gaagccttaccagtgca

SEQ ID NO: 4014 - DNA, 17 bp, Homo sapiens
aagccttaccagtgcaa

SEQ ID NO: 4015 - DNA, 17 bp, Homo sapiens
agccttaccagtgcaat

SEQ ID NO: 4016 - DNA, 17 bp, Homo sapiens
gccttaccagtgcaatc

SEQ ID NO: 4017 - DNA, 17 bp, Homo sapiens
ccttaccagtgcaatca

SEQ ID NO: 4018 - DNA, 17 bp, Homo sapiens
cttaccagtgcaatcag

SEQ ID NO: 4019 - DNA, 17 bp, Homo sapiens
ttaccagtgcaatcagt

SEQ ID NO: 4020 - DNA, 17 bp, Homo sapiens
taccagtgcaatcagtg

SEQ ID NO: 4021 - DNA, 17 bp, Homo sapiens
accagtgcaatcagtgc

SEQ ID NO: 4022 - DNA, 17 bp, Homo sapiens
ccagtgcaatcagtgca

SEQ ID NO: 4023 - DNA, 17 bp, Homo sapiens
cagtgcaatcagtgcaa

SEQ ID NO: 4024 - DNA, 17 bp, Homo sapiens
agtgcaatcagtgcaat

SEQ ID NO: 4025 - DNA, 17 bp, Homo sapiens
gtgcaatcagtgcaata

SEQ ID NO: 4026 - DNA, 17 bp, Homo sapiens
tgcaatcagtgcaataa

SEQ ID NO: 4027 - DNA, 17 bp, Homo sapiens
gcaatcagtgcaataag

SEQ ID NO: 4028 - DNA, 17 bp, Homo sapiens
caatcagtgcaataaga

SEQ ID NO: 4029 - DNA, 17 bp, Homo sapiens
aatcagtgcaataagag

SEQ ID NO: 4030 - DNA, 17 bp, Homo sapiens
atcagtgcaataagagt

SEQ ID NO: 4031 - DNA, 17 bp, Homo sapiens
tcagtgcaataagagtt

SEQ ID NO: 4032 - DNA, 17 bp, Homo sapiens
cagtgcaataagagttt

SEQ ID NO: 4033 - DNA, 17 bp, Homo sapiens
agtgcaataagagtttt

SEQ ID NO: 4034 - DNA, 17 bp, Homo sapiens
gtgcaataagagtttta

SEQ ID NO: 4035 - DNA, 17 bp, Homo sapiens
tgcaataagagttttag

SEQ ID NO: 4036 - DNA, 17 bp, Homo sapiens
gcaataagagttttagt

SEQ ID NO: 4037 - DNA, 17 bp, Homo sapiens
caataagagttttagtc

SEQ ID NO: 4038 - DNA, 17 bp, Homo sapiens
aataagagttttagtcg

SEQ ID NO: 4039 - DNA, 17 bp, Homo sapiens
ataagagttttagtcga

SEQ ID NO: 4040 - DNA, 17 bp, Homo sapiens
taagagttttagtcgac

SEQ ID NO: 4041 - DNA, 17 bp, Homo sapiens
aagagttttagtcgacg

SEQ ID NO: 4042 - DNA, 17 bp, Homo sapiens
agagttttagtcgacgt

SEQ ID NO: 4043 - DNA, 17 bp, Homo sapiens
gagttttagtcgacgtt

SEQ ID NO: 4044 - DNA, 17 bp, Homo sapiens
agttttagtcgacgttc

SEQ ID NO: 4045 - DNA, 17 bp, Homo sapiens
gttttagtcgacgttca

SEQ ID NO: 4046 - DNA, 17 bp, Homo sapiens
ttttagtcgacgttcag

SEQ ID NO: 4047 - DNA, 17 bp, Homo sapiens
tttagtcgacgttcagt

SEQ ID NO: 4048 - DNA, 17 bp, Homo sapiens
ttagtcgacgttcagtc

SEQ ID NO: 4049 - DNA, 17 bp, Homo sapiens
tagtcgacgttcagtcc

SEQ ID NO: 4050 - DNA, 17 bp, Homo sapiens
agtcgacgttcagtcct

SEQ ID NO: 4051 - DNA, 17 bp, Homo sapiens
gtcgacgttcagtcctc

SEQ ID NO: 4052 - DNA, 17 bp, Homo sapiens
tcgacgttcagtcctca

SEQ ID NO: 4053 - DNA, 17 bp, Homo sapiens
cgacgttcagtcctcat

SEQ ID NO: 4054 - DNA, 17 bp, Homo sapiens
gacgttcagtcctcatt

SEQ ID NO: 4055 - DNA, 17 bp, Homo sapiens
acgttcagtcctcatta

SEQ ID NO: 4056 - DNA, 17 bp, Homo sapiens
cgttcagtcctcattaa

SEQ ID NO: 4057 - DNA, 17 bp, Homo sapiens
gttcagtcctcattaag

SEQ ID NO: 4058 - DNA, 17 bp, Homo sapiens
ttcagtcctcattaagc

SEQ ID NO: 4059 - DNA, 17 bp, Homo sapiens
tcagtcctcattaagca

SEQ ID NO: 4060 - DNA, 17 bp, Homo sapiens
cagtcctcattaagcat

SEQ ID NO: 4061 - DNA, 17 bp, Homo sapiens
agtcctcattaagcatc

SEQ ID NO: 4062 - DNA, 17 bp, Homo sapiens
gtcctcattaagcatca

SEQ ID NO: 4063 - DNA, 17 bp, Homo sapiens
tcctcattaagcatcag

SEQ ID NO: 4064 - DNA, 17 bp, Homo sapiens
cctcattaagcatcaga

SEQ ID NO: 4065 - DNA, 17 bp, Homo sapiens
ctcattaagcatcagag

SEQ ID NO: 4066 - DNA, 17 bp, Homo sapiens
tcattaagcatcagaga

SEQ ID NO: 4067 - DNA, 17 bp, Homo sapiens
cattaagcatcagagaa

SEQ ID NO: 4068 - DNA, 17 bp, Homo sapiens
attaagcatcagagaat

SEQ ID NO: 4069 - DNA, 17 bp, Homo sapiens
ttaagcatcagagaatt

SEQ ID NO: 4070 - DNA, 17 bp, Homo sapiens
taagcatcagagaattc

SEQ ID NO: 4071 - DNA, 17 bp, Homo sapiens
aagcatcagagaattca

SEQ ID NO: 4072 - DNA, 17 bp, Homo sapiens
agcatcagagaattcac

SEQ ID NO: 4073 - DNA, 17 bp, Homo sapiens
gcatcagagaattcaca

SEQ ID NO: 4074 - DNA, 17 bp, Homo sapiens
catcagagaattcacac

SEQ ID NO: 4075 - DNA, 17 bp, Homo sapiens
atcagagaattcacact

SEQ ID NO: 4076 - DNA, 17 bp, Homo sapiens
tcagagaattcacactg

SEQ ID NO: 4077 - DNA, 17 bp, Homo sapiens
cagagaattcacactgg

SEQ ID NO: 4078 - DNA, 17 bp, Homo sapiens
agagaattcacactgga

SEQ ID NO: 4079 - DNA, 17 bp, Homo sapiens
gagaattcacactggag

SEQ ID NO: 4080 - DNA, 17 bp, Homo sapiens
agaattcacactggaga

SEQ ID NO: 4081 - DNA, 17 bp, Homo sapiens
gaattcacactggagag

SEQ ID NO: 4082 - DNA, 17 bp, Homo sapiens
aattcacactggagaga

SEQ ID NO: 4083 - DNA, 17 bp, Homo sapiens
attcacactggagagag

SEQ ID NO: 4084 - DNA, 17 bp, Homo sapiens
ttcacactggagagaga

SEQ ID NO: 4085 - DNA, 17 bp, Homo sapiens
tcacactggagagagac

SEQ ID NO: 4086 - DNA, 17 bp, Homo sapiens
cacactggagagagacc

SEQ ID NO: 4087 - DNA, 17 bp, Homo sapiens
acactggagagagacct

SEQ ID NO: 4088 - DNA, 17 bp, Homo sapiens
cactggagagagacctt

SEQ ID NO: 4089 - DNA, 17 bp, Homo sapiens
actggagagagacctta

SEQ ID NO: 4090 - DNA, 17 bp, Homo sapiens
ctggagagagaccttat

SEQ ID NO: 4091 - DNA, 17 bp, Homo sapiens
tggagagagaccttatg

SEQ ID NO: 4092 - DNA, 17 bp, Homo sapiens
ggagagagaccttatga

SEQ ID NO: 4093 - DNA, 17 bp, Homo sapiens
gagagagaccttatgaa

SEQ ID NO: 4094 - DNA, 17 bp, Homo sapiens
agagagaccttatgaat

SEQ ID NO: 4095 - DNA, 17 bp, Homo sapiens
gagagaccttatgaatg

SEQ ID NO: 4096 - DNA, 17 bp, Homo sapiens
agagaccttatgaatgt

SEQ ID NO: 4097 - DNA, 17 bp, Homo sapiens
gagaccttatgaatgtg

SEQ ID NO: 4098 - DNA, 17 bp, Homo sapiens
agaccttatgaatgtga

SEQ ID NO: 4099 - DNA, 17 bp, Homo sapiens
gaccttatgaatgtgaa

SEQ ID NO: 4100 - DNA, 17 bp, Homo sapiens
accttatgaatgtgaag

SEQ ID NO: 4101 - DNA, 17 bp, Homo sapiens
ccttatgaatgtgaaga

SEQ ID NO: 4102 - DNA, 17 bp, Homo sapiens
cttatgaatgtgaagaa

SEQ ID NO: 4103 - DNA, 17 bp, Homo sapiens
ttatgaatgtgaagaat

SEQ ID NO: 4104 - DNA, 17 bp, Homo sapiens
tatgaatgtgaagaatg

SEQ ID NO: 4105 - DNA, 17 bp, Homo sapiens
atgaatgtgaagaatgt

SEQ ID NO: 4106 - DNA, 17 bp, Homo sapiens
tgaatgtgaagaatgtg

SEQ ID NO: 4107 - DNA, 17 bp, Homo sapiens
gaatgtgaagaatgtgg

SEQ ID NO: 4108 - DNA, 17 bp, Homo sapiens
aatgtgaagaatgtggc

SEQ ID NO: 4109 - DNA, 17 bp, Homo sapiens
atgtgaagaatgtggca

SEQ ID NO: 4110 - DNA, 17 bp, Homo sapiens
tgtgaagaatgtggcaa

SEQ ID NO: 4111 - DNA, 17 bp, Homo sapiens
gtgaagaatgtggcaag

SEQ ID NO: 4112 - DNA, 17 bp, Homo sapiens
tgaagaatgtggcaaga

SEQ ID NO: 4113 - DNA, 17 bp, Homo sapiens
gaagaatgtggcaagaa

SEQ ID NO: 4114 - DNA, 17 bp, Homo sapiens
aagaatgtggcaagaac

SEQ ID NO: 4115 - DNA, 17 bp, Homo sapiens
agaatgtggcaagaact

SEQ ID NO: 4116 - DNA, 17 bp, Homo sapiens
gaatgtggcaagaactt

SEQ ID NO: 4117 - DNA, 17 bp, Homo sapiens
aatgtggcaagaacttc

SEQ ID NO: 4118 - DNA, 17 bp, Homo sapiens
atgtggcaagaacttca

SEQ ID NO: 4119 - DNA, 17 bp, Homo sapiens
tgtggcaagaacttcat

SEQ ID NO: 4120 - DNA, 17 bp, Homo sapiens
gtggcaagaacttcatt

SEQ ID NO: 4121 - DNA, 17 bp, Homo sapiens
tggcaagaacttcattt

SEQ ID NO: 4122 - DNA, 17 bp, Homo sapiens
ggcaagaacttcattta

SEQ ID NO: 4123 - DNA, 17 bp, Homo sapiens
gcaagaacttcatttac

SEQ ID NO: 4124 - DNA, 17 bp, Homo sapiens
caagaacttcatttacc

SEQ ID NO: 4125 - DNA, 17 bp, Homo sapiens
aagaacttcatttacca

SEQ ID NO: 4126 - DNA, 17 bp, Homo sapiens
agaacttcatttaccat

SEQ ID NO: 4127 - DNA, 17 bp, Homo sapiens
gaacttcatttaccatt

SEQ ID NO: 4128 - DNA, 17 bp, Homo sapiens
aacttcatttaccattg

SEQ ID NO: 4129 - DNA, 17 bp, Homo sapiens
acttcatttaccattgc

SEQ ID NO: 4130 - DNA, 17 bp, Homo sapiens
cttcatttaccattgca

SEQ ID NO: 4131 - DNA, 17 bp, Homo sapiens
ttcatttaccattgcaa

SEQ ID NO: 4132 - DNA, 17 bp, Homo sapiens
tcatttaccattgcaac

SEQ ID NO: 4133 - DNA, 17 bp, Homo sapiens
catttaccattgcaacc

SEQ ID NO: 4134 - DNA, 17 bp, Homo sapiens
atttaccattgcaacct

SEQ ID NO: 4135 - DNA, 17 bp, Homo sapiens
tttaccattgcaaccta

SEQ ID NO: 4136 - DNA, 17 bp, Homo sapiens
ttaccattgcaacctaa

SEQ ID NO: 4137 - DNA, 17 bp, Homo sapiens
taccattgcaacctaat

SEQ ID NO: 4138 - DNA, 17 bp, Homo sapiens
accattgcaacctaatc

SEQ ID NO: 4139 - DNA, 17 bp, Homo sapiens
ccattgcaacctaatcc

SEQ ID NO: 4140 - DNA, 17 bp, Homo sapiens
cattgcaacctaatcca

SEQ ID NO: 4141 - DNA, 17 bp, Homo sapiens
attgcaacctaatccag

SEQ ID NO: 4142 - DNA, 17 bp, Homo sapiens
ttgcaacctaatccagc

SEQ ID NO: 4143 - DNA, 17 bp, Homo sapiens
tgcaacctaatccagca

SEQ ID NO: 4144 - DNA, 17 bp, Homo sapiens
gcaacctaatccagcat

SEQ ID NO: 4145 - DNA, 17 bp, Homo sapiens
caacctaatccagcatc

SEQ ID NO: 4146 - DNA, 17 bp, Homo sapiens
aacctaatccagcatcg

SEQ ID NO: 4147 - DNA, 17 bp, Homo sapiens
acctaatccagcatcgg

SEQ ID NO: 4148 - DNA, 17 bp, Homo sapiens
cctaatccagcatcgga

SEQ ID NO: 4149 - DNA, 17 bp, Homo sapiens
ctaatccagcatcggaa

SEQ ID NO: 4150 - DNA, 17 bp, Homo sapiens
taatccagcatcggaaa

SEQ ID NO: 4151 - DNA, 17 bp, Homo sapiens
aatccagcatcggaaag

SEQ ID NO: 4152 - DNA, 17 bp, Homo sapiens
atccagcatcggaaagt

SEQ ID NO: 4153 - DNA, 17 bp, Homo sapiens
tccagcatcggaaagtc

SEQ ID NO: 4154 - DNA, 17 bp, Homo sapiens
ccagcatcggaaagtcc

SEQ ID NO: 4155 - DNA, 17 bp, Homo sapiens
cagcatcggaaagtcca

SEQ ID NO: 4156 - DNA, 17 bp, Homo sapiens
agcatcggaaagtccac

SEQ ID NO: 4157 - DNA, 17 bp, Homo sapiens
gcatcggaaagtccacc

SEQ ID NO: 4158 - DNA, 17 bp, Homo sapiens
catcggaaagtccaccc

SEQ ID NO: 4159 - DNA, 17 bp, Homo sapiens
atcggaaagtccaccca

SEQ ID NO: 4160 - DNA, 17 bp, Homo sapiens
tcggaaagtccacccag

SEQ ID NO: 4161 - DNA, 17 bp, Homo sapiens
cggaaagtccacccagt

SEQ ID NO: 4162 - DNA, 17 bp, Homo sapiens
ggaaagtccacccagtg

SEQ ID NO: 4163 - DNA, 17 bp, Homo sapiens
gaaagtccacccagtgg

SEQ ID NO: 4164 - DNA, 17 bp, Homo sapiens
aaagtccacccagtggc

SEQ ID NO: 4165 - DNA, 17 bp, Homo sapiens
aagtccacccagtggct

SEQ ID NO: 4166 - DNA, 17 bp, Homo sapiens
agtccacccagtggctg

SEQ ID NO: 4167 - DNA, 17 bp, Homo sapiens
gtccacccagtggctga

SEQ ID NO: 4168 - DNA, 17 bp, Homo sapiens
tccacccagtggctgaa

SEQ ID NO: 4169 - DNA, 17 bp, Homo sapiens
ccacccagtggctgaat

SEQ ID NO: 4170 - DNA, 17 bp, Homo sapiens
cacccagtggctgaatc

SEQ ID NO: 4171 - DNA, 17 bp, Homo sapiens
acccagtggctgaatca

SEQ ID NO: 4172 - DNA, 17 bp, Homo sapiens
cccagtggctgaatcaa

SEQ ID NO: 4173 - DNA, 17 bp, Homo sapiens
ccagtggctgaatcaag

SEQ ID NO: 4174 - DNA, 17 bp, Homo sapiens
cagtggctgaatcaagc

SEQ ID NO: 4175 - DNA, 17 bp, Homo sapiens
agtggctgaatcaagct

SEQ ID NO: 4176 - DNA, 17 bp, Homo sapiens
gtggctgaatcaagcta

SEQ ID NO: 4177 - DNA, 17 bp, Homo sapiens
tggctgaatcaagctag

SEQ ID NO: 4178 - DNA, 17 bp, Homo sapiens
ggctgaatcaagctagc

SEQ ID NO: 4179 - DNA, 17 bp, Homo sapiens
gctgaatcaagctagct

SEQ ID NO: 4180 - DNA, 17 bp, Homo sapiens
ctgaatcaagctagctc

SEQ ID NO: 4181 - DNA, 17 bp, Homo sapiens
tgaatcaagctagctcc

SEQ ID NO: 4182 - DNA, 17 bp, Homo sapiens
gaatcaagctagctcct

SEQ ID NO: 4183 - DNA, 17 bp, Homo sapiens
aatcaagctagctcctt

SEQ ID NO: 4184 - DNA, 17 bp, Homo sapiens
atcaagctagctccttg

SEQ ID NO: 4185 - DNA, 17 bp, Homo sapiens
tcaagctagctccttgg

SEQ ID NO: 4186 - DNA, 17 bp, Homo sapiens
caagctagctccttgga

SEQ ID NO: 4187 - DNA, 17 bp, Homo sapiens
aagctagctccttggaa

SEQ ID NO: 4188 - DNA, 17 bp, Homo sapiens
agctagctccttggaac

SEQ ID NO: 4189 - DNA, 17 bp, Homo sapiens
gctagctccttggaaca

SEQ ID NO: 4190 - DNA, 17 bp, Homo sapiens
ctagctccttggaacag

SEQ ID NO: 4191 - DNA, 17 bp, Homo sapiens
tagctccttggaacagg

SEQ ID NO: 4192 - DNA, 17 bp, Homo sapiens
agctccttggaacaggt

SEQ ID NO: 4193 - DNA, 17 bp, Homo sapiens
gctccttggaacaggta

SEQ ID NO: 4194 - DNA, 17 bp, Homo sapiens
ctccttggaacaggtag

SEQ ID NO: 4195 - DNA, 17 bp, Homo sapiens
tccttggaacaggtagg

SEQ ID NO: 4196 - DNA, 25 bp, Homo sapiens
cgggcttttccatcacctcagaatt

SEQ ID NO: 4197 - DNA, 25 bp, Homo sapiens
gggcttttccatcacctcagaattc

SEQ ID NO: 4198 - DNA, 25 bp, Homo sapiens
ggcttttccatcacctcagaattca

SEQ ID NO: 4199 - DNA, 25 bp, Homo sapiens
gcttttccatcacctcagaattcac

SEQ ID NO: 4200 - DNA, 25 bp, Homo sapiens
cttttccatcacctcagaattcaca

SEQ ID NO: 4201 - DNA, 25 bp, Homo sapiens
ttttccatcacctcagaattcacac

SEQ ID NO: 4202 - DNA, 25 bp, Homo sapiens
tttccatcacctcagaattcacact

SEQ ID NO: 4203 - DNA, 25 bp, Homo sapiens
ttccatcacctcagaattcacactg

SEQ ID NO: 4204 - DNA, 25 bp, Homo sapiens
tccatcacctcagaattcacactgg

SEQ ID NO: 4205 - DNA, 25 bp, Homo sapiens
ccatcacctcagaattcacactggg

SEQ ID NO: 4206 - DNA, 25 bp, Homo sapiens
catcacctcagaattcacactgggg

SEQ ID NO: 4207 - DNA, 25 bp, Homo sapiens
atcacctcagaattcacactgggga

SEQ ID NO: 4208 - DNA, 25 bp, Homo sapiens
tcacctcagaattcacactggggag

SEQ ID NO: 4209 - DNA, 25 bp, Homo sapiens
cacctcagaattcacactggggaga

SEQ ID NO: 4210 - DNA, 25 bp, Homo sapiens
acctcagaattcacactggggagaa

SEQ ID NO: 4211 - DNA, 25 bp, Homo sapiens
cctcagaattcacactggggagaag

SEQ ID NO: 4212 - DNA, 25 bp, Homo sapiens
ctcagaattcacactggggagaagc

SEQ ID NO: 4213 - DNA, 25 bp, Homo sapiens
tcagaattcacactggggagaagcc

SEQ ID NO: 4214 - DNA, 25 bp, Homo sapiens
cagaattcacactggggagaagcct

SEQ ID NO: 4215 - DNA, 25 bp, Homo sapiens
agaattcacactggggagaagcctt

SEQ ID NO: 4216 - DNA, 25 bp, Homo sapiens
gaattcacactggggagaagcctta

SEQ ID NO: 4217 - DNA, 25 bp, Homo sapiens
aattcacactggggagaagccttac

SEQ ID NO: 4218 - DNA, 25 bp, Homo sapiens
attcacactggggagaagccttacc

SEQ ID NO: 4219 - DNA, 25 bp, Homo sapiens
ttcacactggggagaagccttacca

SEQ ID NO: 4220 - DNA, 25 bp, Homo sapiens
tcacactggggagaagccttaccag

SEQ ID NO: 4221 - DNA, 25 bp, Homo sapiens
cacactggggagaagccttaccagt

SEQ ID NO: 4222 - DNA, 25 bp, Homo sapiens
acactggggagaagccttaccagtg

SEQ ID NO: 4223 - DNA, 25 bp, Homo sapiens
cactggggagaagccttaccagtgc

SEQ ID NO: 4224 - DNA, 25 bp, Homo sapiens
actggggagaagccttaccagtgca

SEQ ID NO: 4225 - DNA, 25 bp, Homo sapiens
ctggggagaagccttaccagtgcaa

SEQ ID NO: 4226 - DNA, 25 bp, Homo sapiens
tggggagaagccttaccagtgcaat

SEQ ID NO: 4227 - DNA, 25 bp, Homo sapiens
ggggagaagccttaccagtgcaatc

SEQ ID NO: 4228 - DNA, 25 bp, Homo sapiens
gggagaagccttaccagtgcaatca

SEQ ID NO: 4229 - DNA, 25 bp, Homo sapiens
ggagaagccttaccagtgcaatcag

SEQ ID NO: 4230 - DNA, 25 bp, Homo sapiens
gagaagccttaccagtgcaatcagt

SEQ ID NO: 4231 - DNA, 25 bp, Homo sapiens
agaagccttaccagtgcaatcagtg

SEQ ID NO: 4232 - DNA, 25 bp, Homo sapiens
gaagccttaccagtgcaatcagtgc

SEQ ID NO: 4233 - DNA, 25 bp, Homo sapiens
aagccttaccagtgcaatcagtgca

SEQ ID NO: 4234 - DNA, 25 bp, Homo sapiens
agccttaccagtgcaatcagtgcaa

SEQ ID NO: 4235 - DNA, 25 bp, Homo sapiens
gccttaccagtgcaatcagtgcaat

SEQ ID NO: 4236 - DNA, 25 bp, Homo sapiens
ccttaccagtgcaatcagtgcaata

SEQ ID NO: 4237 - DNA, 25 bp, Homo sapiens
cttaccagtgcaatcagtgcaataa

SEQ ID NO: 4238 - DNA, 25 bp, Homo sapiens
ttaccagtgcaatcagtgcaataag

SEQ ID NO: 4239 - DNA, 25 bp, Homo sapiens
taccagtgcaatcagtgcaataaga

SEQ ID NO: 4240 - DNA, 25 bp, Homo sapiens
accagtgcaatcagtgcaataagag

SEQ ID NO: 4241 - DNA, 25 bp, Homo sapiens
ccagtgcaatcagtgcaataagagt

SEQ ID NO: 4242 - DNA, 25 bp, Homo sapiens
cagtgcaatcagtgcaataagagtt

SEQ ID NO: 4243 - DNA, 25 bp, Homo sapiens
agtgcaatcagtgcaataagagttt

SEQ ID NO: 4244 - DNA, 25 bp, Homo sapiens
gtgcaatcagtgcaataagagtttt

SEQ ID NO: 4245 - DNA, 25 bp, Homo sapiens
tgcaatcagtgcaataagagtttta

SEQ ID NO: 4246 - DNA, 25 bp, Homo sapiens
gcaatcagtgcaataagagttttag

SEQ ID NO: 4247 - DNA, 25 bp, Homo sapiens
caatcagtgcaataagagttttagt

SEQ ID NO: 4248 - DNA, 25 bp, Homo sapiens
aatcagtgcaataagagttttagtc

SEQ ID NO: 4249 - DNA, 25 bp, Homo sapiens
atcagtgcaataagagttttagtcg

SEQ ID NO: 4250 - DNA, 25 bp, Homo sapiens
tcagtgcaataagagttttagtcga

SEQ ID NO: 4251 - DNA, 25 bp, Homo sapiens
cagtgcaataagagttttagtcgac

SEQ ID NO: 4252 - DNA, 25 bp, Homo sapiens
agtgcaataagagttttagtcgacg

SEQ ID NO: 4253 - DNA, 25 bp, Homo sapiens
gtgcaataagagttttagtcgacgt

SEQ ID NO: 4254 - DNA, 25 bp, Homo sapiens
tgcaataagagttttagtcgacgtt

SEQ ID NO: 4255 - DNA, 25 bp, Homo sapiens
gcaataagagttttagtcgacgttc

SEQ ID NO: 4256 - DNA, 25 bp, Homo sapiens
caataagagttttagtcgacgttca

SEQ ID NO: 4257 - DNA, 25 bp, Homo sapiens
aataagagttttagtcgacgttcag

SEQ ID NO: 4258 - DNA, 25 bp, Homo sapiens
ataagagttttagtcgacgttcagt

SEQ ID NO: 4259 - DNA, 25 bp, Homo sapiens
taagagttttagtcgacgttcagtc

SEQ ID NO: 4260 - DNA, 25 bp, Homo sapiens
aagagttttagtcgacgttcagtcc

SEQ ID NO: 4261 - DNA, 25 bp, Homo sapiens
agagttttagtcgacgttcagtcct

SEQ ID NO: 4262 - DNA, 25 bp, Homo sapiens
gagttttagtcgacgttcagtcctc

SEQ ID NO: 4263 - DNA, 25 bp, Homo sapiens
agttttagtcgacgttcagtcctca

SEQ ID NO: 4264 - DNA, 25 bp, Homo sapiens
gttttagtcgacgttcagtcctcat

SEQ ID NO: 4265 - DNA, 25 bp, Homo sapiens
ttttagtcgacgttcagtcctcatt

SEQ ID NO: 4266 - DNA, 25 bp, Homo sapiens
tttagtcgacgttcagtcctcatta

SEQ ID NO: 4267 - DNA, 25 bp, Homo sapiens
ttagtcgacgttcagtcctcattaa

SEQ ID NO: 4268 - DNA, 25 bp, Homo sapiens
tagtcgacgttcagtcctcattaag

SEQ ID NO: 4269 - DNA, 25 bp, Homo sapiens
agtcgacgttcagtcctcattaagc

SEQ ID NO: 4270 - DNA, 25 bp, Homo sapiens
gtcgacgttcagtcctcattaagca

SEQ ID NO: 4271 - DNA, 25 bp, Homo sapiens
tcgacgttcagtcctcattaagcat

SEQ ID NO: 4272 - DNA, 25 bp, Homo sapiens
cgacgttcagtcctcattaagcatc

SEQ ID NO: 4273 - DNA, 25 bp, Homo sapiens
gacgttcagtcctcattaagcatca

SEQ ID NO: 4274 - DNA, 25 bp, Homo sapiens
acgttcagtcctcattaagcatcag

SEQ ID NO: 4275 - DNA, 25 bp, Homo sapiens
cgttcagtcctcattaagcatcaga

SEQ ID NO: 4276 - DNA, 25 bp, Homo sapiens
gttcagtcctcattaagcatcagag

SEQ ID NO: 4277 - DNA, 25 bp, Homo sapiens
ttcagtcctcattaagcatcagaga

SEQ ID NO: 4278 - DNA, 25 bp, Homo sapiens
tcagtcctcattaagcatcagagaa

SEQ ID NO: 4279 - DNA, 25 bp, Homo sapiens
cagtcctcattaagcatcagagaat

SEQ ID NO: 4280 - DNA, 25 bp, Homo sapiens
agtcctcattaagcatcagagaatt

SEQ ID NO: 4281 - DNA, 25 bp, Homo sapiens
gtcctcattaagcatcagagaattc

SEQ ID NO: 4282 - DNA, 25 bp, Homo sapiens
tcctcattaagcatcagagaattca

SEQ ID NO: 4283 - DNA, 25 bp, Homo sapiens
cctcattaagcatcagagaattcac

SEQ ID NO: 4284 - DNA, 25 bp, Homo sapiens
ctcattaagcatcagagaattcaca

SEQ ID NO: 4285 - DNA, 25 bp, Homo sapiens
tcattaagcatcagagaattcacac

SEQ ID NO: 4286 - DNA, 25 bp, Homo sapiens
cattaagcatcagagaattcacact

SEQ ID NO: 4287 - DNA, 25 bp, Homo sapiens
attaagcatcagagaattcacactg

SEQ ID NO: 4288 - DNA, 25 bp, Homo sapiens
ttaagcatcagagaattcacactgg

SEQ ID NO: 4289 - DNA, 25 bp, Homo sapiens
taagcatcagagaattcacactgga

SEQ ID NO: 4290 - DNA, 25 bp, Homo sapiens
aagcatcagagaattcacactggag

SEQ ID NO: 4291 - DNA, 25 bp, Homo sapiens
agcatcagagaattcacactggaga

SEQ ID NO: 4292 - DNA, 25 bp, Homo sapiens
gcatcagagaattcacactggagag

SEQ ID NO: 4293 - DNA, 25 bp, Homo sapiens
catcagagaattcacactggagaga

SEQ ID NO: 4294 - DNA, 25 bp, Homo sapiens
atcagagaattcacactggagagag

SEQ ID NO: 4295 - DNA, 25 bp, Homo sapiens
tcagagaattcacactggagagaga

SEQ ID NO: 4296 - DNA, 25 bp, Homo sapiens
cagagaattcacactggagagagac

SEQ ID NO: 4297 - DNA, 25 bp, Homo sapiens
agagaattcacactggagagagacc

SEQ ID NO: 4298 - DNA, 25 bp, Homo sapiens
gagaattcacactggagagagacct

SEQ ID NO: 4299 - DNA, 25 bp, Homo sapiens
agaattcacactggagagagacctt

SEQ ID NO: 4300 - DNA, 25 bp, Homo sapiens
gaattcacactggagagagacctta

SEQ ID NO: 4301 - DNA, 25 bp, Homo sapiens
aattcacactggagagagaccttat

SEQ ID NO: 4302 - DNA, 25 bp, Homo sapiens
attcacactggagagagaccttatg

SEQ ID NO: 4303 - DNA, 25 bp, Homo sapiens
ttcacactggagagagaccttatga

SEQ ID NO: 4304 - DNA, 25 bp, Homo sapiens
tcacactggagagagaccttatgaa

SEQ ID NO: 4305 - DNA, 25 bp, Homo sapiens
cacactggagagagaccttatgaat

SEQ ID NO: 4306 - DNA, 25 bp, Homo sapiens
acactggagagagaccttatgaatg

SEQ ID NO: 4307 - DNA, 25 bp, Homo sapiens
cactggagagagaccttatgaatgt

SEQ ID NO: 4308 - DNA, 25 bp, Homo sapiens
actggagagagaccttatgaatgtg

SEQ ID NO: 4309 - DNA, 25 bp, Homo sapiens
ctggagagagaccttatgaatgtga

SEQ ID NO: 4310 - DNA, 25 bp, Homo sapiens
tggagagagaccttatgaatgtgaa

SEQ ID NO: 4311 - DNA, 25 bp, Homo sapiens
ggagagagaccttatgaatgtgaag

SEQ ID NO: 4312 - DNA, 25 bp, Homo sapiens
gagagagaccttatgaatgtgaaga

SEQ ID NO: 4313 - DNA, 25 bp, Homo sapiens
agagagaccttatgaatgtgaagaa

SEQ ID NO: 4314 - DNA, 25 bp, Homo sapiens
gagagaccttatgaatgtgaagaat

SEQ ID NO: 4315 - DNA, 25 bp, Homo sapiens
agagaccttatgaatgtgaagaatg

SEQ ID NO: 4316 - DNA, 25 bp, Homo sapiens
gagaccttatgaatgtgaagaatgt

SEQ ID NO: 4317 - DNA, 25 bp, Homo sapiens
agaccttatgaatgtgaagaatgtg

SEQ ID NO: 4318 - DNA, 25 bp, Homo sapiens
gaccttatgaatgtgaagaatgtgg

SEQ ID NO: 4319 - DNA, 25 bp, Homo sapiens
accttatgaatgtgaagaatgtggc

SEQ ID NO: 4320 - DNA, 25 bp, Homo sapiens
ccttatgaatgtgaagaatgtggca

SEQ ID NO: 4321 - DNA, 25 bp, Homo sapiens
cttatgaatgtgaagaatgtggcaa

SEQ ID NO: 4322 - DNA, 25 bp, Homo sapiens
ttatgaatgtgaagaatgtggcaag

SEQ ID NO: 4323 - DNA, 25 bp, Homo sapiens
tatgaatgtgaagaatgtggcaaga

SEQ ID NO: 4324 - DNA, 25 bp, Homo sapiens
atgaatgtgaagaatgtggcaagaa

SEQ ID NO: 4325 - DNA, 25 bp, Homo sapiens
tgaatgtgaagaatgtggcaagaac

SEQ ID NO: 4326 - DNA, 25 bp, Homo sapiens
gaatgtgaagaatgtggcaagaact

SEQ ID NO: 4327 - DNA, 25 bp, Homo sapiens
aatgtgaagaatgtggcaagaactt

SEQ ID NO: 4328 - DNA, 25 bp, Homo sapiens
atgtgaagaatgtggcaagaacttc

SEQ ID NO: 4329 - DNA, 25 bp, Homo sapiens
tgtgaagaatgtggcaagaacttca

SEQ ID NO: 4330 - DNA, 25 bp, Homo sapiens
gtgaagaatgtggcaagaacttcat

SEQ ID NO: 4331 - DNA, 25 bp, Homo sapiens
tgaagaatgtggcaagaacttcatt

SEQ ID NO: 4332 - DNA, 25 bp, Homo sapiens
gaagaatgtggcaagaacttcattt

SEQ ID NO: 4333 - DNA, 25 bp, Homo sapiens
aagaatgtggcaagaacttcattta

SEQ ID NO: 4334 - DNA, 25 bp, Homo sapiens
agaatgtggcaagaacttcatttac

SEQ ID NO: 4335 - DNA, 25 bp, Homo sapiens
gaatgtggcaagaacttcatttacc

SEQ ID NO: 4336 - DNA, 25 bp, Homo sapiens
aatgtggcaagaacttcatttacca

SEQ ID NO: 4337 - DNA, 25 bp, Homo sapiens
atgtggcaagaacttcatttaccat

SEQ ID NO: 4338 - DNA, 25 bp, Homo sapiens
tgtggcaagaacttcatttaccatt

SEQ ID NO: 4339 - DNA, 25 bp, Homo sapiens
gtggcaagaacttcatttaccattg

SEQ ID NO: 4340 - DNA, 25 bp, Homo sapiens
tggcaagaacttcatttaccattgc

SEQ ID NO: 4341 - DNA, 25 bp, Homo sapiens
ggcaagaacttcatttaccattgca

SEQ ID NO: 4342 - DNA, 25 bp, Homo sapiens
gcaagaacttcatttaccattgcaa

SEQ ID NO: 4343 - DNA, 25 bp, Homo sapiens
caagaacttcatttaccattgcaac

SEQ ID NO: 4344 - DNA, 25 bp, Homo sapiens
aagaacttcatttaccattgcaacc

SEQ ID NO: 4345 - DNA, 25 bp, Homo sapiens
agaacttcatttaccattgcaacct

SEQ ID NO: 4346 - DNA, 25 bp, Homo sapiens
gaacttcatttaccattgcaaccta

SEQ ID NO: 4347 - DNA, 25 bp, Homo sapiens
aacttcatttaccattgcaacctaa

SEQ ID NO: 4348 - DNA, 25 bp, Homo sapiens
acttcatttaccattgcaacctaat

SEQ ID NO: 4349 - DNA, 25 bp, Homo sapiens
cttcatttaccattgcaacctaatc

SEQ ID NO: 4350 - DNA, 25 bp, Homo sapiens
ttcatttaccattgcaacctaatcc

SEQ ID NO: 4351 - DNA, 25 bp, Homo sapiens
tcatttaccattgcaacctaatcca

SEQ ID NO: 4352 - DNA, 25 bp, Homo sapiens
catttaccattgcaacctaatccag

SEQ ID NO: 4353 - DNA, 25 bp, Homo sapiens
atttaccattgcaacctaatccagc

SEQ ID NO: 4354 - DNA, 25 bp, Homo sapiens
tttaccattgcaacctaatccagca

SEQ ID NO: 4355 - DNA, 25 bp, Homo sapiens
ttaccattgcaacctaatccagcat

SEQ ID NO: 4356 - DNA, 25 bp, Homo sapiens
taccattgcaacctaatccagcatc

SEQ ID NO: 4357 - DNA, 25 bp, Homo sapiens
accattgcaacctaatccagcatcg

SEQ ID NO: 4358 - DNA, 25 bp, Homo sapiens
ccattgcaacctaatccagcatcgg

SEQ ID NO: 4359 - DNA, 25 bp, Homo sapiens
cattgcaacctaatccagcatcgga

SEQ ID NO: 4360 - DNA, 25 bp, Homo sapiens
attgcaacctaatccagcatcggaa

SEQ ID NO: 4361 - DNA, 25 bp, Homo sapiens
ttgcaacctaatccagcatcggaaa

SEQ ID NO: 4362 - DNA, 25 bp, Homo sapiens
tgcaacctaatccagcatcggaaag

SEQ ID NO: 4363 - DNA, 25 bp, Homo sapiens
gcaacctaatccagcatcggaaagt

SEQ ID NO: 4364 - DNA, 25 bp, Homo sapiens
caacctaatccagcatcggaaagtc

SEQ ID NO: 4365 - DNA, 25 bp, Homo sapiens
aacctaatccagcatcggaaagtcc

SEQ ID NO: 4366 - DNA, 25 bp, Homo sapiens
acctaatccagcatcggaaagtcca

SEQ ID NO: 4367 - DNA, 25 bp, Homo sapiens
cctaatccagcatcggaaagtccac

SEQ ID NO: 4368 - DNA, 25 bp, Homo sapiens
ctaatccagcatcggaaagtccacc

SEQ ID NO: 4369 - DNA, 25 bp, Homo sapiens
taatccagcatcggaaagtccaccc

SEQ ID NO: 4370 - DNA, 25 bp, Homo sapiens
aatccagcatcggaaagtccaccca

SEQ ID NO: 4371 - DNA, 25 bp, Homo sapiens
atccagcatcggaaagtccacccag

SEQ ID NO: 4372 - DNA, 25 bp, Homo sapiens
tccagcatcggaaagtccacccagt

SEQ ID NO: 4373 - DNA, 25 bp, Homo sapiens
ccagcatcggaaagtccacccagtg

SEQ ID NO: 4374 - DNA, 25 bp, Homo sapiens
cagcatcggaaagtccacccagtgg

SEQ ID NO: 4375 - DNA, 25 bp, Homo sapiens
agcatcggaaagtccacccagtggc

SEQ ID NO: 4376 - DNA, 25 bp, Homo sapiens
gcatcggaaagtccacccagtggct

SEQ ID NO: 4377 - DNA, 25 bp, Homo sapiens
catcggaaagtccacccagtggctg

SEQ ID NO: 4378 - DNA, 25 bp, Homo sapiens
atcggaaagtccacccagtggctga

SEQ ID NO: 4379 - DNA, 25 bp, Homo sapiens
tcggaaagtccacccagtggctgaa

SEQ ID NO: 4380 - DNA, 25 bp, Homo sapiens
cggaaagtccacccagtggctgaat

SEQ ID NO: 4381 - DNA, 25 bp, Homo sapiens
ggaaagtccacccagtggctgaatc

SEQ ID NO: 4382 - DNA, 25 bp, Homo sapiens
gaaagtccacccagtggctgaatca

SEQ ID NO: 4383 - DNA, 25 bp, Homo sapiens
aaagtccacccagtggctgaatcaa

SEQ ID NO: 4384 - DNA, 25 bp, Homo sapiens
aagtccacccagtggctgaatcaag

SEQ ID NO: 4385 - DNA, 25 bp, Homo sapiens
agtccacccagtggctgaatcaagc

SEQ ID NO: 4386 - DNA, 25 bp, Homo sapiens
gtccacccagtggctgaatcaagct

SEQ ID NO: 4387 - DNA, 25 bp, Homo sapiens
tccacccagtggctgaatcaagcta

SEQ ID NO: 4388 - DNA, 25 bp, Homo sapiens
ccacccagtggctgaatcaagctag

SEQ ID NO: 4389 - DNA, 25 bp, Homo sapiens
cacccagtggctgaatcaagctagc

SEQ ID NO: 4390 - DNA, 25 bp, Homo sapiens
acccagtggctgaatcaagctagct

SEQ ID NO: 4391 - DNA, 25 bp, Homo sapiens
cccagtggctgaatcaagctagctc

SEQ ID NO: 4392 - DNA, 25 bp, Homo sapiens
ccagtggctgaatcaagctagctcc

SEQ ID NO: 4393 - DNA, 25 bp, Homo sapiens
cagtggctgaatcaagctagctcct

SEQ ID NO: 4394 - DNA, 25 bp, Homo sapiens
agtggctgaatcaagctagctcctt

SEQ ID NO: 4395 - DNA, 25 bp, Homo sapiens
gtggctgaatcaagctagctccttg

SEQ ID NO: 4396 - DNA, 25 bp, Homo sapiens
tggctgaatcaagctagctccttgg

SEQ ID NO: 4397 - DNA, 25 bp, Homo sapiens
ggctgaatcaagctagctccttgga

SEQ ID NO: 4398 - DNA, 25 bp, Homo sapiens
gctgaatcaagctagctccttggaa

SEQ ID NO: 4399 - DNA, 25 bp, Homo sapiens
ctgaatcaagctagctccttggaac

SEQ ID NO: 4400 - DNA, 25 bp, Homo sapiens
tgaatcaagctagctccttggaaca

SEQ ID NO: 4401 - DNA, 25 bp, Homo sapiens
gaatcaagctagctccttggaacag

SEQ ID NO: 4402 - DNA, 25 bp, Homo sapiens
aatcaagctagctccttggaacagg

SEQ ID NO: 4403 - DNA, 25 bp, Homo sapiens
atcaagctagctccttggaacaggt

SEQ ID NO: 4404 - DNA, 25 bp, Homo sapiens
tcaagctagctccttggaacaggta

SEQ ID NO: 4405 - DNA, 25 bp, Homo sapiens
caagctagctccttggaacaggtag

SEQ ID NO: 4406 - DNA, 25 bp, Homo sapiens
aagctagctccttggaacaggtagg

SEQ ID NO: 4407 - DNA, 2198 bp, Homo sapiens
cctgttcccgctgcccctcgggctggcactgccaggagtactcagagctcaaagctgggatctgcagtcccttacccactcagtgcacgccgcctaaggctttgcgcttcacctttactcacctcgaagccctggacatccgcatctgccctaagacttctcacctcagtagcagaaggaagtcgcgtcagctggccacagcctctctcctaggagaccgtccgggaaaagcgagtcagggtagaccctgaggcccctcagctccggctattttcagatctgtcgctccttcaccctcagcctttcaaacaggccactccaaaaaaaagcccaatcacagccttccttcttctcctggccttccggcactgtccaatcaacgtacgccatctatcggattttcagttcccaaacccgcttttatctcgtgggtggaaggagaagtggaggcgtggagcccggaggcccaggatcccgacggtgagagctctgcagctttcagcaggggccaaggacaggaagcaggatccagggatgggaatgagaagaaggaaaggctgaagaagtgtccaaaacaaaaagaggtggcgcatgaagtggctgtcaaggagtggtggcccagcgtcgcctgcccagagttctgcaaccctaggcagagccccatgaatccctggctcaaggacactctgacccgaagactgccccactcttgcccagactgtggccgcaacttcagctacccttccctcctggccagccaccagcgggtccactccggggagcggcccttctcctgcggccagtgtcaggcgcgtttctcccagcgcaggtacctgctccagcatcagttcatccacaccggcgagaagccctacccctgccccgactgcgggcgccgcttccgccagaggggttccctggctatccacaggcgggctcacaccggggagaagccttacgcgtgctcagactgcaagagtcgcttcacttacccctacctgctggccatccaccagcgcaagcacacgggcgagaagccctacagctgccccgattgcagcctccgtttcgcctacacctccctgctggccatccacaggcgcatacacaccggcgagaagccctacccctgtcctgactgcggccgccgcttcacctattcttccctcctcctcagtcaccggcgcattcactccgacagccggcccttcccctgcgtggagtgtgggaaaggcttcaagcgcaagaccgccctggaagcccatcggtggatccaccgctcctgcagcgagaggcgcgcgtggcagcaggccgtggtggggcgttcagagcccatccctgttttgggaggcaaggatcccccagttcacttccggcactttccagatatatttcaagagtgtgggtgatggcgttcacacaaactggtcagcgtttccctggagaggaagaggcaagatatttgcatgttccctggattttgtattttttgataaagatatattcttgggccacagtagctggagatataatgccggaggattcttttttttttttttttgagacagagtctgtctctattgcctgggctggagtgcagtggcccaagctacgctcactgcaagctccacctcctgggttcacaccattctcctgcttcagtctcccgagtagctggaattacaagcacccgccaccacgcccaactaatattttgtatttttagtagagacgggggtttcaccgtgttagccaggatggtctcgatctcctgacttcgtgatcctcccgcctcggcctcccaaagtgctgggattacaggcgtgagccactgcacccagcctctttttttttttgagatggagtttcgctcttgttgcccaggctagagtgcaatggcatgatcttggctcactgcaacctccgcctcctaggttcaagcgattctcctgccccagcctcttgagtagctgggattacaggcacccacgaccatgcctggctaattgcatttttactagagacaggtttcaccatgttggccaggctggtctccaattcctgacctcaggtgatccacccgacttggcctcccaaagttctgggattacattttttttttaaagaaagaataaattaattgtgattaaagttgaaatcaaggcatagttaaaaaaaaaaaaaaaaaaaaaaaaaaa

SEQ ID NO: 4408 - DNA, 747 bp, Homo sapiens
atgaatccctggctcaaggacactctgacccgaagactgccccactcttgcccagactgtggccgcaacttcagctacccttccctcctggccagccaccagcgggtccactccggggagcggcccttctcctgcggccagtgtcaggcgcgtttctcccagcgcaggtacctgctccagcatcagttcatccacaccggcgagaagccctacccctgccccgactgcgggcgccgcttccgccagaggggttccctggctatccacaggcgggctcacaccggggagaagccttacgcgtgctcagactgcaagagtcgcttcacttacccctacctgctggccatccaccagcgcaagcacacgggcgagaagccctacagctgccccgattgcagcctccgtttcgcctacacctccctgctggccatccacaggcgcatacacaccggcgagaagccctacccctgtcctgactgcggccgccgcttcacctattcttccctcctcctcagtcaccggcgcattcactccgacagccggcccttcccctgcgtggagtgtgggaaaggcttcaagcgcaagaccgccctggaagcccatcggtggatccaccgctcctgcagcgagaggcgcgcgtggcagcaggccgtggtggggcgttcagagcccatccctgttttgggaggcaaggatcccccagttcacttccggcactttccagatatatttcaagagtgtgggtga

SEQ ID NO: 4409 - protein, 248 aa, Homo sapiens [sequence omitted]

SEQ ID NO: 4410 - DNA, 395 bp, Homo sapiens
cctgttcccgctgcccctcgggctggcactgccaggagtactcagagctcaaagctgggatctgcagtcccttacccactcagtgcacgccgcctaaggctttgcgcttcacctttactcacctcgaagccctggacatccgcatctgccctaagacttctcacctcagtagcagaaggaagtcgcgtcagctggccacagcctctctcctaggagaccgtccgggaaaagcgagtcagggtagaccctgaggcccctcagctccggctattttcagatctgtcgctccttcaccctcagcctttcaaacaggccactccaaaaaaaagcccaatcacagccttccttcttctcctggccttccggcactgtccaatcaacgtacgccatctatc

SEQ ID NO: 4411 - DNA, 320 bp, Homo sapiens
atatttgcatgttccctggattttgtattttttgataaagatatattcttgggccacagtagctggagatataatgccggaggattcttttttttttttttttgagacagagtctgtctctattgcctgggctggagtgcagtggcccaagctacgctcactgcaagctccacctcctgggttcacaccattctcctgcttcagtctcccgagtagctggaattacaagcacccgccaccacgcccaactaatattttgtatttttagtagagacgggggtttcaccgtgttagccaggatggtctcgatctcctgactt

SEQ ID NO: 4412 - DNA, 396 bp, Homo sapiens
cctgttcccgctgcccctcgggctggcactgccaggagtactcagagctcaaagctgggatctgcagtcccttacccactcagtgcacgccgcctaaggctttgcgcttcacctttactcacctcgaagccctggacatccgcatctgccctaagacttctcacctcagtagcagaaggaagtcgcgtcagctggccacagcctctctcctaggagaccgtccgggaaaagcgagtcagggtagaccctgaggcccctcagctccggctattttcagatctgtcgctccttcaccctcagcctttcaaacaggccactccaaaaaaaagcccaatcacagccttccttcttctcctggccttccggcactgtccaatcaacgtacgccatctatcg

SEQ ID NO: 4413 - DNA, 129 bp, Homo sapiens
gattttcagttcccaaacccgcttttatctcgtgggtggaaggagaagtggaggcgtggagcccggaggcccaggatcccgacggtgagagctctgcagctttcagcaggggccaaggacaggaagcag

SEQ ID NO: 4414 - DNA, 933 bp, Homo sapiens
gatccagggatgggaatgagaagaaggaaaggctgaagaagtgtccaaaacaaaaagaggtggcgcatgaagtggctgtcaaggagtggtggcccagcgtcgcctgcccagagttctgcaaccctaggcagagccccatgaatccctggctcaaggacactctgacccgaagactgccccactcttgcccagactgtggccgcaacttcagctacccttccctcctggccagccaccagcgggtccactccggggagcggcccttctcctgcggccagtgtcaggcgcgtttctcccagcgcaggtacctgctccagcatcagttcatccacaccggcgagaagccctacccctgccccgactgcgggcgccgcttccgccagaggggttccctggctatccacaggcgggctcacaccggggagaagccttacgcgtgctcagactgcaagagtcgcttcacttacccctacctgctggccatccaccagcgcaagcacacgggcgagaagccctacagctgccccgattgcagcctccgtttcgcctacacctccctgctggccatccacaggcgcatacacaccggcgagaagccctacccctgtcctgactgcggccgccgcttcacctattcttccctcctcctcagtcaccggcgcattcactccgacagccggcccttcccctgcgtggagtgtgggaaaggcttcaagcgcaagaccgccctggaagcccatcggtggatccaccgctcctgcagcgagaggcgcgcgtggcagcaggccgtggtggggcgttcagagcccatccctgttttgggaggcaaggatcccccagttcacttccggcactttccagatatatttcaagagtgtgggtgatggcgttcacacaaactggtcagcgtttccctggagaggaagaggcaag

SEQ ID NO: 4415 - DNA, 712 bp, Homo sapiens
atatttgcatgttccctggattttgtattttttgataaagatatattcttgggccacagtagctggagatataatgccggaggattcttttttttttttttttgagacagagtctgtctctattgcctgggctggagtgcagtggcccaagctacgctcactgcaagctccacctcctgggttcacaccattctcctgcttcagtctcccgagtagctggaattacaagcacccgccaccacgcccaactaatattttgtatttttagtagagacgggggtttcaccgtgttagccaggatggtctcgatctcctgacttcgtgatcctcccgcctcggcctcccaaagtgctgggattacaggcgtgagccactgcacccagcctctttttttttttgagatggagtttcgctcttgttgcccaggctagagtgcaatggcatgatcttggctcactgcaacctccgcctcctaggttcaagcgattctcctgccccagcctcttgagtagctgggattacaggcacccacgaccatgcctggctaattgcatttttactagagacaggtttcaccatgttggccaggctggtctccaattcctgacctcaggtgatccacccgacttggcctcccaaagttctgggattacattttttttttaaagaaagaataaattaattgtgattaaagttgaaatcaaggcatagt

SEQ ID NO: 4416 - DNA, 500 bp, Homo sapiens
gggaagacatctgtgacctcggggcaaaggtcaaattagatcctgggtaggatcctgttcccgctgcccctcgggctggcactgccaggagtactcagagctcaaagctgggatctgcagtcccttacccactcagtgcacgccgcctaaggctttgcgcttcacctttactcacctcgaagccctggacatccgcatctgccctaagacttctcacctcagtagcagaaggaagtcgcgtcagctggccacagcctctctcctaggagaccgtccgggaaaagcgagtcagggtagaccctgaggcccctcagctccggctattttcagatctgtcgctccttcaccctcagcctttcaaacaggccactccaaaaaaaagcccaatcacagccttccttcttctcctggccttccggcactgtccaatcaacgtacgccatctatcggttagtggtgttgcggggccacccttcccgctggtttccctcgtggtgtgt

SEQ ID NO: 4417 - DNA, 500 bp, Homo sapiens
gggagaccttcggccacctgggcgcgctgggtgaggccgggccctccggccgggacccccagtccgtcggtgggaagcggtgatcggtgtccccagaggctagtgggctggaagcggggcgccgagggagcagtctcattctcccctcccgtgcgctcagccgagcccattgtttctccttcgcaggattttcagttcccaaacccgcttttatctcgtgggtggaaggagaagtggaggcgtggagcccggaggcccaggatcccgacggtgagagctctgcagctttcagcaggggccaaggacaggaagcaggtacttcatttggataagtagccgtggagaagccccaacccccgcccccaactcactcacatcctcagcgcaggctgccccctccaaagtcccatcctgtctccctgcaccctaccccagaaacgtcctcatctcactgcaaaatggcccgatggaacagcgaaattgggatctatggaaccgat

SEQ ID NO: 4418 - DNA, 500 bp, Homo sapiens
cttccctcctggccagccaccagcgggtccactccggggagcggcccttctcctgcggccagtgtcaggcgcgtttctcccagcgcaggtacctgctccagcatcagttcatccacaccggcgagaagccctacccctgccccgactgcgggcgccgcttccgccagaggggttccctggctatccacaggcgggctcacaccggggagaagccttacgcgtgctcagactgcaagagtcgcttcacttacccctacctgctggccatccaccagcgcaagcacacgggcgagaagccctacagctgccccgattgcagcctccgtttcgcctacacctccctgctggccatccacaggcgcatacacaccggcgagaagccctacccctgtcctgactgcggccgccgcttcacctattcttccctcctcctcagtcaccggcgcattcactccgacagccggcccttcccctgcgtggagtgtgggaaaggcttcaag

SEQ ID NO: 4419 - DNA, 500 bp, Homo sapiens
gagacagagtctgtctctattgcctgggctggagtgcagtggcccaagctacgctcactgcaagctccacctcctgggttcacaccattctcctgcttcagtctcccgagtagctggaattacaagcacccgccaccacgcccaactaatattttgtatttttagtagagacgggggtttcaccgtgttagccaggatggtctcgatctcctgacttcgtgatcctcccgcctcggcctcccaaagtgctgggattacaggcgtgagccactgcacccagcctctttttttttttgagatggagtttcgctcttgttgcccaggctagagtgcaatggcatgatcttggctcactgcaacctccgcctcctaggttcaagcgattctcctgccccagcctcttgagtagctgggattacaggcacccacgaccatgcctggctaattgcatttttactagagacaggtttcaccatgttggccaggctggtctccaattc

SEQ ID NO: 4420 - DNA, 1000 bp, Homo sapiens
gcctggtctcaaactcctgactttaagtgatccacacacctcagcctcccaaagtgctgggattacaggtgtgagcctccacacccggccgaattcacatgaattttaaagtgatgtcttcaaagtggtttcactgtggggatgggcagctttttgttatacatctagaacgttcctcttctgtttctatgaatactcggttggaaagggctgaaaaacggtcttaagagattatctgattcgtttcccagttttattactcacatatcagctgtaatttgagcacgttttctgattgagacaagactcagatggtattaaacattactacaacacatccgggcacggtggctcacgcctgtaatcccagcactttgggaggccgaggcgggcggatcacgaggtcaggagatcgagaccatcctggctaacacggtgaagccctgtctctactaaaaatacaaaaaattaggcgggcatggtggcgggcgcctgtagtcccagctactcgggaggctgaggcaggagaatggcgtgaacccgggaggcggagcttgcagtgagccgagatcgcgccactgcactccagcctgggcgacagagcaagactccatctcaaaaaaaaaaaaaaaaaaaaaaaactacaacactataaattcatatctattataatagtactttgtgcagggccctaccctaagtccttaaccgaacccggaagcgagaagatgacttttgtttgtttttagagatgggcgcctggctctgtcgccagcctggagtgtgggggcgcgatctcgactcacagcagcctccacctcccgagttcaggcgatcttcctgcctcagcccctcgaggagctgggaccaccggcgcgctccatcgcgcccggctaggagctgactttgaatccgggctctgcgcctggccttctgcatctctataagggaagacatctgtgacctcggggcaaaggtcaaattagatcctgggtaggat

SEQ ID NO: 4421 - DNA, 17 bp, Homo sapiens
cctgttcccgctgcccc

SEQ ID NO: 4422 - DNA, 17 bp, Homo sapiens
ctgttcccgctgcccct

SEQ ID NO: 4423 - DNA, 17 bp, Homo sapiens
tgttcccgctgcccctc

SEQ ID NO: 4424 - DNA, 17 bp, Homo sapiens
gttcccgctgcccctcg

SEQ ID NO: 4425 - DNA, 17 bp, Homo sapiens
ttcccgctgcccctcgg

SEQ ID NO: 4426 - DNA, 17 bp, Homo sapiens
tcccgctgcccctcggg

SEQ ID NO: 4427 - DNA, 17 bp, Homo sapiens
cccgctgcccctcgggc

SEQ ID NO: 4428 - DNA, 17 bp, Homo sapiens
ccgctgcccctcgggct

SEQ ID NO: 4429 - DNA, 17 bp, Homo sapiens
cgctgcccctcgggctg

SEQ ID NO: 4430 - DNA, 17 bp, Homo sapiens
gctgcccctcgggctgg

SEQ ID NO: 4431 - DNA, 17 bp, Homo sapiens
ctgcccctcgggctggc

SEQ ID NO: 4432 - DNA, 17 bp, Homo sapiens
tgcccctcgggctggca

SEQ ID NO: 4433 - DNA, 17 bp, Homo sapiens
gcccctcgggctggcac

SEQ ID NO: 4434 - DNA, 17 bp, Homo sapiens
cccctcgggctggcact

SEQ ID NO: 4435 - DNA, 17 bp, Homo sapiens
ccctcgggctggcactg

SEQ ID NO: 4436 - DNA, 17 bp, Homo sapiens
cctcgggctggcactgc

SEQ ID NO: 4437 - DNA, 17 bp, Homo sapiens
ctcgggctggcactgcc

SEQ ID NO: 4438 - DNA, 17 bp, Homo sapiens
tcgggctggcactgcca

SEQ ID NO: 4439 - DNA, 17 bp, Homo sapiens
cgggctggcactgccag

SEQ ID NO: 4440 - DNA, 17 bp, Homo sapiens
gggctggcactgccagg

SEQ ID NO: 4441 - DNA, 17 bp, Homo sapiens
ggctggcactgccagga

SEQ ID NO: 4442 - DNA, 17 bp, Homo sapiens
gctggcactgccaggag

SEQ ID NO: 4443 - DNA, 17 bp, Homo sapiens
ctggcactgccaggagt

SEQ ID NO: 4444 - DNA, 17 bp, Homo sapiens
tggcactgccaggagta

SEQ ID NO: 4445 - DNA, 17 bp, Homo sapiens
ggcactgccaggagtac

SEQ ID NO: 4446 - DNA, 17 bp, Homo sapiens
gcactgccaggagtact

SEQ ID NO: 4447 - DNA, 17 bp, Homo sapiens
cactgccaggagtactc

SEQ ID NO: 4448 - DNA, 17 bp, Homo sapiens
actgccaggagtactca

SEQ ID NO: 4449 - DNA, 17 bp, Homo sapiens
ctgccaggagtactcag

SEQ ID NO: 4450 - DNA, 17 bp, Homo sapiens
tgccaggagtactcaga

SEQ ID NO: 4451 - DNA, 17 bp, Homo sapiens
gccaggagtactcagag

SEQ ID NO: 4452 - DNA, 17 bp, Homo sapiens
ccaggagtactcagagc

SEQ ID NO: 4453 - DNA, 17 bp, Homo sapiens
caggagtactcagagct

SEQ ID NO: 4454 - DNA, 17 bp, Homo sapiens
aggagtactcagagctc

SEQ ID NO: 4455 - DNA, 17 bp, Homo sapiens
ggagtactcagagctca

SEQ ID NO: 4456 - DNA, 17 bp, Homo sapiens
gagtactcagagctcaa

SEQ ID NO: 4457 - DNA, 17 bp, Homo sapiens
agtactcagagctcaaa

SEQ ID NO: 4458 - DNA, 17 bp, Homo sapiens
gtactcagagctcaaag

SEQ ID NO: 4459 - DNA, 17 bp, Homo sapiens
tactcagagctcaaagc

SEQ ID NO: 4460 - DNA, 17 bp, Homo sapiens
actcagagctcaaagct

SEQ ID NO: 4461 - DNA, 17 bp, Homo sapiens
ctcagagctcaaagctg

SEQ ID NO: 4462 - DNA, 17 bp, Homo sapiens
tcagagctcaaagctgg

SEQ ID NO: 4463 - DNA, 17 bp, Homo sapiens
cagagctcaaagctggg

SEQ ID NO: 4464 - DNA, 17 bp, Homo sapiens
agagctcaaagctggga

SEQ ID NO: 4465 - DNA, 17 bp, Homo sapiens
gagctcaaagctgggat

SEQ ID NO: 4466 - DNA, 17 bp, Homo sapiens
agctcaaagctgggatc

SEQ ID NO: 4467 - DNA, 17 bp, Homo sapiens
gctcaaagctgggatct

SEQ ID NO: 4468 - DNA, 17 bp, Homo sapiens
ctcaaagctgggatctg

SEQ ID NO: 4469 - DNA, 17 bp, Homo sapiens
tcaaagctgggatctgc

SEQ ID NO: 4470 - DNA, 17 bp, Homo sapiens
caaagctgggatctgca

SEQ ID NO: 4471 - DNA, 17 bp, Homo sapiens
aaagctgggatctgcag

SEQ ID NO: 4472 - DNA, 17 bp, Homo sapiens
aagctgggatctgcagt

SEQ ID NO: 4473 - DNA, 17 bp, Homo sapiens
agctgggatctgcagtc

SEQ ID NO: 4474 - DNA, 17 bp, Homo sapiens
gctgggatctgcagtcc

SEQ ID NO: 4475 - DNA, 17 bp, Homo sapiens
ctgggatctgcagtccc

SEQ ID NO: 4476 - DNA, 17 bp, Homo sapiens
tgggatctgcagtccct

SEQ ID NO: 4477 - DNA, 17 bp, Homo sapiens
gggatctgcagtccctt

SEQ ID NO: 4478 - DNA, 17 bp, Homo sapiens
ggatctgcagtccctta

SEQ ID NO: 4479 - DNA, 17 bp, Homo sapiens
gatctgcagtcccttac

SEQ ID NO: 4480 - DNA, 17 bp, Homo sapiens
atctgcagtcccttacc

SEQ ID NO: 4481 - DNA, 17 bp, Homo sapiens
tctgcagtcccttaccc

SEQ ID NO: 4482 - DNA, 17 bp, Homo sapiens
ctgcagtcccttaccca

SEQ ID NO: 4483 - DNA, 17 bp, Homo sapiens
tgcagtcccttacccac

SEQ ID NO: 4484 - DNA, 17 bp, Homo sapiens
gcagtcccttacccact

SEQ ID NO: 4485 - DNA, 17 bp, Homo sapiens
cagtcccttacccactc

SEQ ID NO: 4486 - DNA, 17 bp, Homo sapiens
agtcccttacccactca

SEQ ID NO: 4487 - DNA, 17 bp, Homo sapiens
gtcccttacccactcag

SEQ ID NO: 4488 - DNA, 17 bp, Homo sapiens
tcccttacccactcagt

SEQ ID NO: 4489 - DNA, 17 bp, Homo sapiens
cccttacccactcagtg

SEQ ID NO: 4490 - DNA, 17 bp, Homo sapiens
ccttacccactcagtgc

SEQ ID NO: 4491 - DNA, 17 bp, Homo sapiens
cttacccactcagtgca

SEQ ID NO: 4492 - DNA, 17 bp, Homo sapiens
ttacccactcagtgcac

SEQ ID NO: 4493 - DNA, 17 bp, Homo sapiens
tacccactcagtgcacg

SEQ ID NO: 4494 - DNA, 17 bp, Homo sapiens
acccactcagtgcacgc

SEQ ID NO: 4495 - DNA, 17 bp, Homo sapiens
cccactcagtgcacgcc

SEQ ID NO: 4496 - DNA, 17 bp, Homo sapiens
ccactcagtgcacgccg

SEQ ID NO: 4497 - DNA, 17 bp, Homo sapiens
cactcagtgcacgccgc

SEQ ID NO: 4498 - DNA, 17 bp, Homo sapiens
actcagtgcacgccgcc

SEQ ID NO: 4499 - DNA, 17 bp, Homo sapiens
ctcagtgcacgccgcct

SEQ ID NO: 4500 - DNA, 17 bp, Homo sapiens
tcagtgcacgccgccta

SEQ ID NO: 4501 - DNA, 17 bp, Homo sapiens
cagtgcacgccgcctaa

SEQ ID NO: 4502 - DNA, 17 bp, Homo sapiens
agtgcacgccgcctaag

SEQ ID NO: 4503 - DNA, 17 bp, Homo sapiens
gtgcacgccgcctaagg

SEQ ID NO: 4504 - DNA, 17 bp, Homo sapiens
tgcacgccgcctaaggc

SEQ ID NO: 4505 - DNA, 17 bp, Homo sapiens
gcacgccgcctaaggct

SEQ ID NO: 4506 - DNA, 17 bp, Homo sapiens
cacgccgcctaaggctt

SEQ ID NO: 4507 - DNA, 17 bp, Homo sapiens
acgccgcctaaggcttt

SEQ ID NO: 4508 - DNA, 17 bp, Homo sapiens
cgccgcctaaggctttg

SEQ ID NO: 4509 - DNA, 17 bp, Homo sapiens
gccgcctaaggctttgc

SEQ ID NO: 4510 - DNA, 17 bp, Homo sapiens
ccgcctaaggctttgcg

SEQ ID NO: 4511 - DNA, 17 bp, Homo sapiens
cgcctaaggctttgcgc

SEQ ID NO: 4512 - DNA, 17 bp, Homo sapiens
gcctaaggctttgcgct

SEQ ID NO: 4513 - DNA, 17 bp, Homo sapiens
cctaaggctttgcgctt

SEQ ID NO: 4514 - DNA, 17 bp, Homo sapiens
ctaaggctttgcgcttc

SEQ ID NO: 4515 - DNA, 17 bp, Homo sapiens
taaggctttgcgcttca

SEQ ID NO: 4516 - DNA, 17 bp, Homo sapiens
aaggctttgcgcttcac

SEQ ID NO: 4517 - DNA, 17 bp, Homo sapiens
aggctttgcgcttcacc

SEQ ID NO: 4518 - DNA, 17 bp, Homo sapiens
ggctttgcgcttcacct

SEQ ID NO: 4519 - DNA, 17 bp, Homo sapiens
gctttgcgcttcacctt

SEQ ID NO: 4520 - DNA, 17 bp, Homo sapiens
ctttgcgcttcaccttt

SEQ ID NO: 4521 - DNA, 17 bp, Homo sapiens
tttgcgcttcaccttta

SEQ ID NO: 4522 - DNA, 17 bp, Homo sapiens
ttgcgcttcacctttac

SEQ ID NO: 4523 - DNA, 17 bp, Homo sapiens
tgcgcttcacctttact

SEQ ID NO: 4524 - DNA, 17 bp, Homo sapiens
gcgcttcacctttactc

SEQ ID NO: 4525 - DNA, 17 bp, Homo sapiens
cgcttcacctttactca

SEQ ID NO: 4526 - DNA, 17 bp, Homo sapiens
gcttcacctttactcac

SEQ ID NO: 4527 - DNA, 17 bp, Homo sapiens
cttcacctttactcacc

SEQ ID NO: 4528 - DNA, 17 bp, Homo sapiens
ttcacctttactcacct

SEQ ID NO: 4529 - DNA, 17 bp, Homo sapiens
tcacctttactcacctc

SEQ ID NO: 4530 - DNA, 17 bp, Homo sapiens
cacctttactcacctcg

SEQ ID NO: 4531 - DNA, 17 bp, Homo sapiens
acctttactcacctcga

SEQ ID NO: 4532 - DNA, 17 bp, Homo sapiens
cctttactcacctcgaa

SEQ ID NO: 4533 - DNA, 17 bp, Homo sapiens
ctttactcacctcgaag

SEQ ID NO: 4534 - DNA, 17 bp, Homo sapiens
tttactcacctcgaagc

SEQ ID NO: 4535 - DNA, 17 bp, Homo sapiens
ttactcacctcgaagcc

SEQ ID NO: 4536 - DNA, 17 bp, Homo sapiens
tactcacctcgaagccc

SEQ ID NO: 4537 - DNA, 17 bp, Homo sapiens
actcacctcgaagccct

SEQ ID NO: 4538 - DNA, 17 bp, Homo sapiens
ctcacctcgaagccctg

SEQ ID NO: 4539 - DNA, 17 bp, Homo sapiens
tcacctcgaagccctgg

SEQ ID NO: 4540 - DNA, 17 bp, Homo sapiens
cacctcgaagccctgga

SEQ ID NO: 4541 - DNA, 17 bp, Homo sapiens
acctcgaagccctggac

SEQ ID NO: 4542 - DNA, 17 bp, Homo sapiens
cctcgaagccctggaca

SEQ ID NO: 4543 - DNA, 17 bp, Homo sapiens
ctcgaagccctggacat

SEQ ID NO: 4544 - DNA, 17 bp, Homo sapiens
tcgaagccctggacatc

SEQ ID NO: 4545 - DNA, 17 bp, Homo sapiens
cgaagccctggacatcc

SEQ ID NO: 4546 - DNA, 17 bp, Homo sapiens
gaagccctggacatccg

SEQ ID NO: 4547 - DNA, 17 bp, Homo sapiens
aagccctggacatccgc

SEQ ID NO: 4548 - DNA, 17 bp, Homo sapiens
agccctggacatccgca

SEQ ID NO: 4549 - DNA, 17 bp, Homo sapiens
gccctggacatccgcat

SEQ ID NO: 4550 - DNA, 17 bp, Homo sapiens
ccctggacatccgcatc

SEQ ID NO: 4551 - DNA, 17 bp, Homo sapiens
cctggacatccgcatct

SEQ ID NO: 4552 - DNA, 17 bp, Homo sapiens
ctggacatccgcatctg

SEQ ID NO: 4553 - DNA, 17 bp, Homo sapiens
tggacatccgcatctgc

SEQ ID NO: 4554 - DNA, 17 bp, Homo sapiens
ggacatccgcatctgcc

SEQ ID NO: 4555 - DNA, 17 bp, Homo sapiens
gacatccgcatctgccc

SEQ ID NO: 4556 - DNA, 17 bp, Homo sapiens
acatccgcatctgccct

SEQ ID NO: 4557 - DNA, 17 bp, Homo sapiens
catccgcatctgcccta

SEQ ID NO: 4558 - DNA, 17 bp, Homo sapiens
atccgcatctgccctaa

SEQ ID NO: 4559 - DNA, 17 bp, Homo sapiens
tccgcatctgccctaag

SEQ ID NO: 4560 - DNA, 17 bp, Homo sapiens
ccgcatctgccctaaga

SEQ ID NO: 4561 - DNA, 17 bp, Homo sapiens
cgcatctgccctaagac

SEQ ID NO: 4562 - DNA, 17 bp, Homo sapiens
gcatctgccctaagact

SEQ ID NO: 4563 - DNA, 17 bp, Homo sapiens
catctgccctaagactt

SEQ ID NO: 4564 - DNA, 17 bp, Homo sapiens
atctgccctaagacttc

SEQ ID NO: 4565 - DNA, 17 bp, Homo sapiens
tctgccctaagacttct

SEQ ID NO: 4566 - DNA, 17 bp, Homo sapiens
ctgccctaagacttctc

SEQ ID NO: 4567 - DNA, 17 bp, Homo sapiens
tgccctaagacttctca

SEQ ID NO: 4568 - DNA, 17 bp, Homo sapiens
gccctaagacttctcac

SEQ ID NO: 4569 - DNA, 17 bp, Homo sapiens
ccctaagacttctcacc

SEQ ID NO: 4570 - DNA, 17 bp, Homo sapiens
cctaagacttctcacct

SEQ ID NO: 4571 - DNA, 17 bp, Homo sapiens
ctaagacttctcacctc

SEQ ID NO: 4572 - DNA, 17 bp, Homo sapiens
taagacttctcacctca

SEQ ID NO: 4573 - DNA, 17 bp, Homo sapiens
aagacttctcacctcag

SEQ ID NO: 4574 - DNA, 17 bp, Homo sapiens
agacttctcacctcagt

SEQ ID NO: 4575 - DNA, 17 bp, Homo sapiens
gacttctcacctcagta

SEQ ID NO: 4576 - DNA, 17 bp, Homo sapiens
acttctcacctcagtag

SEQ ID NO: 4577 - DNA, 17 bp, Homo sapiens
cttctcacctcagtagc

SEQ ID NO: 4578 - DNA, 17 bp, Homo sapiens
ttctcacctcagtagca

SEQ ID NO: 4579 - DNA, 17 bp, Homo sapiens
tctcacctcagtagcag

SEQ ID NO: 4580 - DNA, 17 bp, Homo sapiens
ctcacctcagtagcaga

SEQ ID NO: 4581 - DNA, 17 bp, Homo sapiens
tcacctcagtagcagaa

SEQ ID NO: 4582 - DNA, 17 bp, Homo sapiens
cacctcagtagcagaag

SEQ ID NO: 4583 - DNA, 17 bp, Homo sapiens
acctcagtagcagaagg

SEQ ID NO: 4584 - DNA, 17 bp, Homo sapiens
cctcagtagcagaagga

SEQ ID NO: 4585 - DNA, 17 bp, Homo sapiens
ctcagtagcagaaggaa

SEQ ID NO: 4586 - DNA, 17 bp, Homo sapiens
tcagtagcagaaggaag

SEQ ID NO: 4587 - DNA, 17 bp, Homo sapiens
cagtagcagaaggaagt

SEQ ID NO: 4588 - DNA, 17 bp, Homo sapiens
agtagcagaaggaagtc

SEQ ID NO: 4589 - DNA, 17 bp, Homo sapiens
gtagcagaaggaagtcg

SEQ ID NO: 4590 - DNA, 17 bp, Homo sapiens
tagcagaaggaagtcgc

SEQ ID NO: 4591 - DNA, 17 bp, Homo sapiens
agcagaaggaagtcgcg

SEQ ID NO: 4592 - DNA, 17 bp, Homo sapiens
gcagaaggaagtcgcgt

SEQ ID NO: 4593 - DNA, 17 bp, Homo sapiens
cagaaggaagtcgcgtc

SEQ ID NO: 4594 - DNA, 17 bp, Homo sapiens
agaaggaagtcgcgtca

SEQ ID NO: 4595 - DNA, 17 bp, Homo sapiens
gaaggaagtcgcgtcag

SEQ ID NO: 4596 - DNA, 17 bp, Homo sapiens
aaggaagtcgcgtcagc

SEQ ID NO: 4597 - DNA, 17 bp, Homo sapiens
aggaagtcgcgtcagct

SEQ ID NO: 4598 - DNA, 17 bp, Homo sapiens
ggaagtcgcgtcagctg

SEQ ID NO: 4599 - DNA, 17 bp, Homo sapiens
gaagtcgcgtcagctgg

SEQ ID NO: 4600 - DNA, 17 bp, Homo sapiens
aagtcgcgtcagctggc

SEQ ID NO: 4601 - DNA, 17 bp, Homo sapiens
agtcgcgtcagctggcc

SEQ ID NO: 4602 - DNA, 17 bp, Homo sapiens
gtcgcgtcagctggcca

SEQ ID NO: 4603 - DNA, 17 bp, Homo sapiens
tcgcgtcagctggccac

SEQ ID NO: 4604 - DNA, 17 bp, Homo sapiens
cgcgtcagctggccaca

SEQ ID NO: 4605 - DNA, 17 bp, Homo sapiens
gcgtcagctggccacag

SEQ ID NO: 4606 - DNA, 17 bp, Homo sapiens
cgtcagctggccacagc

SEQ ID NO: 4607 - DNA, 17 bp, Homo sapiens
gtcagctggccacagcc

SEQ ID NO: 4608 - DNA, 17 bp, Homo sapiens
tcagctggccacagcct

SEQ ID NO: 4609 - DNA, 17 bp, Homo sapiens
cagctggccacagcctc

SEQ ID NO: 4610 - DNA, 17 bp, Homo sapiens
agctggccacagcctct

SEQ ID NO: 4611 - DNA, 17 bp, Homo sapiens
gctggccacagcctctc

SEQ ID NO: 4612 - DNA, 17 bp, Homo sapiens
ctggccacagcctctct

SEQ ID NO: 4613 - DNA, 17 bp, Homo sapiens
tggccacagcctctctc

SEQ ID NO: 4614 - DNA, 17 bp, Homo sapiens
ggccacagcctctctcc

SEQ ID NO: 4615 - DNA, 17 bp, Homo sapiens
gccacagcctctctcct

SEQ ID NO: 4616 - DNA, 17 bp, Homo sapiens
ccacagcctctctccta

SEQ ID NO: 4617 - DNA, 17 bp, Homo sapiens
cacagcctctctcctag

SEQ ID NO: 4618 - DNA, 17 bp, Homo sapiens
acagcctctctcctagg

SEQ ID NO: 4619 - DNA, 17 bp, Homo sapiens
cagcctctctcctagga

SEQ ID NO: 4620 - DNA, 17 bp, Homo sapiens
agcctctctcctaggag

SEQ ID NO: 4621 - DNA, 17 bp, Homo sapiens
gcctctctcctaggaga

SEQ ID NO: 4622 - DNA, 17 bp, Homo sapiens
cctctctcctaggagac

SEQ ID NO: 4623 - DNA, 17 bp, Homo sapiens
ctctctcctaggagacc

SEQ ID NO: 4624 - DNA, 17 bp, Homo sapiens
tctctcctaggagaccg

SEQ ID NO: 4625 - DNA, 17 bp, Homo sapiens
ctctcctaggagaccgt

SEQ ID NO: 4626 - DNA, 17 bp, Homo sapiens
tctcctaggagaccgtc

SEQ ID NO: 4627 - DNA, 17 bp, Homo sapiens
ctcctaggagaccgtcc

SEQ ID NO: 4628 - DNA, 17 bp, Homo sapiens
tcctaggagaccgtccg

SEQ ID NO: 4629 - DNA, 17 bp, Homo sapiens
cctaggagaccgtccgg

SEQ ID NO: 4630 - DNA, 17 bp, Homo sapiens
ctaggagaccgtccggg

SEQ ID NO: 4631 - DNA, 17 bp, Homo sapiens
taggagaccgtccggga

SEQ ID NO: 4632 - DNA, 17 bp, Homo sapiens
aggagaccgtccgggaa

SEQ ID NO: 4633 - DNA, 17 bp, Homo sapiens
ggagaccgtccgggaaa

SEQ ID NO: 4634 - DNA, 17 bp, Homo sapiens
gagaccgtccgggaaaa

SEQ ID NO: 4635 - DNA, 17 bp, Homo sapiens
agaccgtccgggaaaag

SEQ ID NO: 4636 - DNA, 17 bp, Homo sapiens
gaccgtccgggaaaagc

SEQ ID NO: 4637 - DNA, 17 bp, Homo sapiens
accgtccgggaaaagcg

SEQ ID NO: 4638 - DNA, 17 bp, Homo sapiens
ccgtccgggaaaagcga

SEQ ID NO: 4639 - DNA, 17 bp, Homo sapiens
cgtccgggaaaagcgag

SEQ ID NO: 4640 - DNA, 17 bp, Homo sapiens
gtccgggaaaagcgagt

SEQ ID NO: 4641 - DNA, 17 bp, Homo sapiens
tccgggaaaagcgagtc

SEQ ID NO: 4642 - DNA, 17 bp, Homo sapiens
ccgggaaaagcgagtca

SEQ ID NO: 4643 - DNA, 17 bp, Homo sapiens
cgggaaaagcgagtcag

SEQ ID NO: 4644 - DNA, 17 bp, Homo sapiens
gggaaaagcgagtcagg

SEQ ID NO: 4645 - DNA, 17 bp, Homo sapiens
ggaaaagcgagtcaggg

SEQ ID NO: 4646 - DNA, 17 bp, Homo sapiens
gaaaagcgagtcagggt

SEQ ID NO: 4647 - DNA, 17 bp, Homo sapiens
aaaagcgagtcagggta

SEQ ID NO: 4648 - DNA, 17 bp, Homo sapiens
aaagcgagtcagggtag

SEQ ID NO: 4649 - DNA, 17 bp, Homo sapiens
aagcgagtcagggtaga

SEQ ID NO: 4650 - DNA, 17 bp, Homo sapiens
agcgagtcagggtagac

SEQ ID NO: 4651 - DNA, 17 bp, Homo sapiens
gcgagtcagggtagacc

SEQ ID NO: 4652 - DNA, 17 bp, Homo sapiens
cgagtcagggtagaccc

SEQ ID NO: 4653 - DNA, 17 bp, Homo sapiens
gagtcagggtagaccct

SEQ ID NO: 4654 - DNA, 17 bp, Homo sapiens
agtcagggtagaccctg

SEQ ID NO: 4655 - DNA, 17 bp, Homo sapiens
gtcagggtagaccctga

SEQ ID NO: 4656 - DNA, 17 bp, Homo sapiens
tcagggtagaccctgag

SEQ ID NO: 4657 - DNA, 17 bp, Homo sapiens
cagggtagaccctgagg

SEQ ID NO: 4658 - DNA, 17 bp, Homo sapiens
agggtagaccctgaggc

SEQ ID NO: 4659 - DNA, 17 bp, Homo sapiens
gggtagaccctgaggcc

SEQ ID NO: 4660 - DNA, 17 bp, Homo sapiens
ggtagaccctgaggccc

SEQ ID NO: 4661 - DNA, 17 bp, Homo sapiens
gtagaccctgaggcccc

SEQ ID NO: 4662 - DNA, 17 bp, Homo sapiens
tagaccctgaggcccct

SEQ ID NO: 4663 - DNA, 17 bp, Homo sapiens
agaccctgaggcccctc

SEQ ID NO: 4664 - DNA, 17 bp, Homo sapiens
gaccctgaggcccctca

SEQ ID NO: 4665 - DNA, 17 bp, Homo sapiens
accctgaggcccctcag

SEQ ID NO: 4666 - DNA, 17 bp, Homo sapiens
ccctgaggcccctcagc

SEQ ID NO: 4667 - DNA, 17 bp, Homo sapiens
cctgaggcccctcagct

SEQ ID NO: 4668 - DNA, 17 bp, Homo sapiens
ctgaggcccctcagctc

SEQ ID NO: 4669 - DNA, 17 bp, Homo sapiens
tgaggcccctcagctcc

SEQ ID NO: 4670 - DNA, 17 bp, Homo sapiens
gaggcccctcagctccg

SEQ ID NO: 4671 - DNA, 17 bp, Homo sapiens
aggcccctcagctccgg

SEQ ID NO: 4672 - DNA, 17 bp, Homo sapiens
ggcccctcagctccggc

SEQ ID NO: 4673 - DNA, 17 bp, Homo sapiens
gcccctcagctccggct

SEQ ID NO: 4674 - DNA, 17 bp, Homo sapiens
cccctcagctccggcta

SEQ ID NO: 4675 - DNA, 17 bp, Homo sapiens
ccctcagctccggctat

SEQ ID NO: 4676 - DNA, 17 bp, Homo sapiens
cctcagctccggctatt

SEQ ID NO: 4677 - DNA, 17 bp, Homo sapiens
ctcagctccggctattt

SEQ ID NO: 4678 - DNA, 17 bp, Homo sapiens
tcagctccggctatttt

SEQ ID NO: 4679 - DNA, 17 bp, Homo sapiens
cagctccggctattttc

SEQ ID NO: 4680 - DNA, 17 bp, Homo sapiens
agctccggctattttca

SEQ ID NO: 4681 - DNA, 17 bp, Homo sapiens
gctccggctattttcag

SEQ ID NO: 4682 - DNA, 17 bp, Homo sapiens
ctccggctattttcaga

SEQ ID NO: 4683 - DNA, 17 bp, Homo sapiens
tccggctattttcagat

SEQ ID NO: 4684 - DNA, 17 bp, Homo sapiens
ccggctattttcagatc

SEQ ID NO: 4685 - DNA, 17 bp, Homo sapiens
cggctattttcagatct

SEQ ID NO: 4686 - DNA, 17 bp, Homo sapiens
ggctattttcagatctg

SEQ ID NO: 4687 - DNA, 17 bp, Homo sapiens
gctattttcagatctgt

SEQ ID NO: 4688 - DNA, 17 bp, Homo sapiens
ctattttcagatctgtc

SEQ ID NO: 4689 - DNA, 17 bp, Homo sapiens
tattttcagatctgtcg

SEQ ID NO: 4690 - DNA, 17 bp, Homo sapiens
attttcagatctgtcgc

SEQ ID NO: 4691 - DNA, 17 bp, Homo sapiens
ttttcagatctgtcgct

SEQ ID NO: 4692 - DNA, 17 bp, Homo sapiens
tttcagatctgtcgctc

SEQ ID NO: 4693 - DNA, 17 bp, Homo sapiens
ttcagatctgtcgctcc

SEQ ID NO: 4694 - DNA, 17 bp, Homo sapiens
tcagatctgtcgctcct

SEQ ID NO: 4695 - DNA, 17 bp, Homo sapiens
cagatctgtcgctcctt

SEQ ID NO: 4696 - DNA, 17 bp, Homo sapiens
agatctgtcgctccttc

SEQ ID NO: 4697 - DNA, 17 bp, Homo sapiens
gatctgtcgctccttca

SEQ ID NO: 4698 - DNA, 17 bp, Homo sapiens
atctgtcgctccttcac

SEQ ID NO: 4699 - DNA, 17 bp, Homo sapiens
tctgtcgctccttcacc

SEQ ID NO: 4700 - DNA, 17 bp, Homo sapiens
ctgtcgctccttcaccc

SEQ ID NO: 4701 - DNA, 17 bp, Homo sapiens
tgtcgctccttcaccct

SEQ ID NO: 4702 - DNA, 17 bp, Homo sapiens
gtcgctccttcaccctc

SEQ ID NO: 4703 - DNA, 17 bp, Homo sapiens
tcgctccttcaccctca

SEQ ID NO: 4704 - DNA, 17 bp, Homo sapiens
cgctccttcaccctcag

SEQ ID NO: 4705 - DNA, 17 bp, Homo sapiens
gctccttcaccctcagc

SEQ ID NO: 4706 - DNA, 17 bp, Homo sapiens
ctccttcaccctcagcc

SEQ ID NO: 4707 - DNA, 17 bp, Homo sapiens
tccttcaccctcagcct

SEQ ID NO: 4708 - DNA, 17 bp, Homo sapiens
ccttcaccctcagcctt

SEQ ID NO: 4709 - DNA, 17 bp, Homo sapiens
cttcaccctcagccttt

SEQ ID NO: 4710 - DNA, 17 bp, Homo sapiens
ttcaccctcagcctttc

SEQ ID NO: 4711 - DNA, 17 bp, Homo sapiens
tcaccctcagcctttca

SEQ ID NO: 4712 - DNA, 17 bp, Homo sapiens
caccctcagcctttcaa

SEQ ID NO: 4713 - DNA, 17 bp, Homo sapiens
accctcagcctttcaaa

SEQ ID NO: 4714 - DNA, 17 bp, Homo sapiens
ccctcagcctttcaaac

SEQ ID NO: 4715 - DNA, 17 bp, Homo sapiens
cctcagcctttcaaaca

SEQ ID NO: 4716 - DNA, 17 bp, Homo sapiens
ctcagcctttcaaacag

SEQ ID NO: 4717 - DNA, 17 bp, Homo sapiens
tcagcctttcaaacagg

SEQ ID NO: 4718 - DNA, 17 bp, Homo sapiens
cagcctttcaaacaggc

SEQ ID NO: 4719 - DNA, 17 bp, Homo sapiens
agcctttcaaacaggcc

SEQ ID NO: 4720 - DNA, 17 bp, Homo sapiens
gcctttcaaacaggcca

SEQ ID NO: 4721 - DNA, 17 bp, Homo sapiens
cctttcaaacaggccac

SEQ ID NO: 4722 - DNA, 17 bp, Homo sapiens
ctttcaaacaggccact

SEQ ID NO: 4723 - DNA, 17 bp, Homo sapiens
tttcaaacaggccactc

SEQ ID NO: 4724 - DNA, 17 bp, Homo sapiens
ttcaaacaggccactcc

SEQ ID NO: 4725 - DNA, 17 bp, Homo sapiens
tcaaacaggccactcca

SEQ ID NO: 4726 - DNA, 17 bp, Homo sapiens
caaacaggccactccaa

SEQ ID NO: 4727 - DNA, 17 bp, Homo sapiens
aaacaggccactccaaa

SEQ ID NO: 4728 - DNA, 17 bp, Homo sapiens
aacaggccactccaaaa

SEQ ID NO: 4729 - DNA, 17 bp, Homo sapiens
acaggccactccaaaaa

SEQ ID NO: 4730 - DNA, 17 bp, Homo sapiens
caggccactccaaaaaa

SEQ ID NO: 4731 - DNA, 17 bp, Homo sapiens
aggccactccaaaaaaa

SEQ ID NO: 4732 - DNA, 17 bp, Homo sapiens
ggccactccaaaaaaaa

SEQ ID NO: 4733 - DNA, 17 bp, Homo sapiens
gccactccaaaaaaaag

SEQ ID NO: 4734 - DNA, 17 bp, Homo sapiens
ccactccaaaaaaaagc

SEQ ID NO: 4735 - DNA, 17 bp, Homo sapiens
cactccaaaaaaaagcc

SEQ ID NO: 4736 - DNA, 17 bp, Homo sapiens
actccaaaaaaaagccc

SEQ ID NO: 4737 - DNA, 17 bp, Homo sapiens
ctccaaaaaaaagccca

SEQ ID NO: 4738 - DNA, 17 bp, Homo sapiens
tccaaaaaaaagcccaa

SEQ ID NO: 4739 - DNA, 17 bp, Homo sapiens
ccaaaaaaaagcccaat

SEQ ID NO: 4740 - DNA, 17 bp, Homo sapiens
caaaaaaaagcccaatc

SEQ ID NO: 4741 - DNA, 17 bp, Homo sapiens
aaaaaaaagcccaatca

SEQ ID NO: 4742 - DNA, 17 bp, Homo sapiens
aaaaaaagcccaatcac

SEQ ID NO: 4743 - DNA, 17 bp, Homo sapiens
aaaaaagcccaatcaca

SEQ ID NO: 4744 - DNA, 17 bp, Homo sapiens
aaaaagcccaatcacag

SEQ ID NO: 4745 - DNA, 17 bp, Homo sapiens
aaaagcccaatcacagc

SEQ ID NO: 4746 - DNA, 17 bp, Homo sapiens
aaagcccaatcacagcc

SEQ ID NO: 4747 - DNA, 17 bp, Homo sapiens
aagcccaatcacagcct

SEQ ID NO: 4748 - DNA, 17 bp, Homo sapiens
agcccaatcacagcctt

SEQ ID NO: 4749 - DNA, 17 bp, Homo sapiens
gcccaatcacagccttc

SEQ ID NO: 4750 - DNA, 17 bp, Homo sapiens
cccaatcacagccttcc

SEQ ID NO: 4751 - DNA, 17 bp, Homo sapiens
ccaatcacagccttcct

SEQ ID NO: 4752 - DNA, 17 bp, Homo sapiens
caatcacagccttcctt

SEQ ID NO: 4753 - DNA, 17 bp, Homo sapiens
aatcacagccttccttc

SEQ ID NO: 4754 - DNA, 17 bp, Homo sapiens
atcacagccttccttct

SEQ ID NO: 4755 - DNA, 17 bp, Homo sapiens
tcacagccttccttctt

SEQ ID NO: 4756 - DNA, 17 bp, Homo sapiens
cacagccttccttcttc

SEQ ID NO: 4757 - DNA, 17 bp, Homo sapiens
acagccttccttcttct

SEQ ID NO: 4758 - DNA, 17 bp, Homo sapiens
cagccttccttcttctc

SEQ ID NO: 4759 - DNA, 17 bp, Homo sapiens
agccttccttcttctcc

SEQ ID NO: 4760 - DNA, 17 bp, Homo sapiens
gccttccttcttctcct

SEQ ID NO: 4761 - DNA, 17 bp, Homo sapiens
ccttccttcttctcctg

SEQ ID NO: 4762 - DNA, 17 bp, Homo sapiens
cttccttcttctcctgg

SEQ ID NO: 4763 - DNA, 17 bp, Homo sapiens
ttccttcttctcctggc

SEQ ID NO: 4764 - DNA, 17 bp, Homo sapiens
tccttcttctcctggcc

SEQ ID NO: 4765 - DNA, 17 bp, Homo sapiens
ccttcttctcctggcct

SEQ ID NO: 4766 - DNA, 17 bp, Homo sapiens
cttcttctcctggcctt

SEQ ID NO: 4767 - DNA, 17 bp, Homo sapiens
ttcttctcctggccttc

SEQ ID NO: 4768 - DNA, 17 bp, Homo sapiens
tcttctcctggccttcc

SEQ ID NO: 4769 - DNA, 17 bp, Homo sapiens
cttctcctggccttccg

SEQ ID NO: 4770 - DNA, 17 bp, Homo sapiens
ttctcctggccttccgg

SEQ ID NO: 4771 - DNA, 17 bp, Homo sapiens
tctcctggccttccggc

SEQ ID NO: 4772 - DNA, 17 bp, Homo sapiens
ctcctggccttccggca

SEQ ID NO: 4773 - DNA, 17 bp, Homo sapiens
tcctggccttccggcac

SEQ ID NO: 4774 - DNA, 17 bp, Homo sapiens
cctggccttccggcact

SEQ ID NO: 4775 - DNA, 17 bp, Homo sapiens
ctggccttccggcactg

SEQ ID NO: 4776 - DNA, 17 bp, Homo sapiens
tggccttccggcactgt

SEQ ID NO: 4777 - DNA, 17 bp, Homo sapiens
ggccttccggcactgtc

SEQ ID NO: 4778 - DNA, 17 bp, Homo sapiens
gccttccggcactgtcc

SEQ ID NO: 4779 - DNA, 17 bp, Homo sapiens
ccttccggcactgtcca

SEQ ID NO: 4780 - DNA, 17 bp, Homo sapiens
cttccggcactgtccaa

SEQ ID NO: 4781 - DNA, 17 bp, Homo sapiens
ttccggcactgtccaat

SEQ ID NO: 4782 - DNA, 17 bp, Homo sapiens
tccggcactgtccaatc

SEQ ID NO: 4783 - DNA, 17 bp, Homo sapiens
ccggcactgtccaatca

SEQ ID NO: 4784 - DNA, 17 bp, Homo sapiens
cggcactgtccaatcaa

SEQ ID NO: 4785 - DNA, 17 bp, Homo sapiens
ggcactgtccaatcaac

SEQ ID NO: 4786 - DNA, 17 bp, Homo sapiens
gcactgtccaatcaacg

SEQ ID NO: 4787 - DNA, 17 bp, Homo sapiens
cactgtccaatcaacgt

SEQ ID NO: 4788 - DNA, 17 bp, Homo sapiens
actgtccaatcaacgta

SEQ ID NO: 4789 - DNA, 17 bp, Homo sapiens
ctgtccaatcaacgtac

SEQ ID NO: 4790 - DNA, 17 bp, Homo sapiens
tgtccaatcaacgtacg

SEQ ID NO: 4791 - DNA, 17 bp, Homo sapiens
gtccaatcaacgtacgc

SEQ ID NO: 4792 - DNA, 17 bp, Homo sapiens
tccaatcaacgtacgcc

SEQ ID NO: 4793 - DNA, 17 bp, Homo sapiens
ccaatcaacgtacgcca

SEQ ID NO: 4794 - DNA, 17 bp, Homo sapiens
caatcaacgtacgccat

SEQ ID NO: 4795 - DNA, 17 bp, Homo sapiens
aatcaacgtacgccatc

SEQ ID NO: 4796 - DNA, 17 bp, Homo sapiens
atcaacgtacgccatct

SEQ ID NO: 4797 - DNA, 17 bp, Homo sapiens
tcaacgtacgccatcta

SEQ ID NO: 4798 - DNA, 17 bp, Homo sapiens
caacgtacgccatctat

SEQ ID NO: 4799 - DNA, 17 bp, Homo sapiens
aacgtacgccatctatc

SEQ ID NO: 4800 - DNA, 25 bp, Homo sapiens
cctgttcccgctgcccctcgggctg

SEQ ID NO: 4801 - DNA, 25 bp, Homo sapiens
ctgttcccgctgcccctcgggctgg

SEQ ID NO: 4802 - DNA, 25 bp, Homo sapiens
tgttcccgctgcccctcgggctggc

SEQ ID NO: 4803 - DNA, 25 bp, Homo sapiens
gttcccgctgcccctcgggctggca

SEQ ID NO: 4804 - DNA, 25 bp, Homo sapiens
ttcccgctgcccctcgggctggcac

SEQ ID NO: 4805 - DNA, 25 bp, Homo sapiens
tcccgctgcccctcgggctggcact

SEQ ID NO: 4806 - DNA, 25 bp, Homo sapiens
cccgctgcccctcgggctggcactg

SEQ ID NO: 4807 - DNA, 25 bp, Homo sapiens
ccgctgcccctcgggctggcactgc

SEQ ID NO: 4808 - DNA, 25 bp, Homo sapiens
cgctgcccctcgggctggcactgcc

SEQ ID NO: 4809 - DNA, 25 bp, Homo sapiens
gctgcccctcgggctggcactgcca

SEQ ID NO: 4810 - DNA, 25 bp, Homo sapiens
ctgcccctcgggctggcactgccag

SEQ ID NO: 4811 - DNA, 25 bp, Homo sapiens
tgcccctcgggctggcactgccagg

SEQ ID NO: 4812 - DNA, 25 bp, Homo sapiens
gcccctcgggctggcactgccagga

SEQ ID NO: 4813 - DNA, 25 bp, Homo sapiens
cccctcgggctggcactgccaggag

SEQ ID NO: 4814 - DNA, 25 bp, Homo sapiens
ccctcgggctggcactgccaggagt

SEQ ID NO: 4815 - DNA, 25 bp, Homo sapiens
cctcgggctggcactgccaggagta

SEQ ID NO: 4816 - DNA, 25 bp, Homo sapiens
ctcgggctggcactgccaggagtac

SEQ ID NO: 4817 - DNA, 25 bp, Homo sapiens
tcgggctggcactgccaggagtact

SEQ ID NO: 4818 - DNA, 25 bp, Homo sapiens
cgggctggcactgccaggagtactc

SEQ ID NO: 4819 - DNA, 25 bp, Homo sapiens
gggctggcactgccaggagtactca

SEQ ID NO: 4820 - DNA, 25 bp, Homo sapiens
ggctggcactgccaggagtactcag

SEQ ID NO: 4821 - DNA, 25 bp, Homo sapiens
gctggcactgccaggagtactcaga

SEQ ID NO: 4822 - DNA, 25 bp, Homo sapiens
ctggcactgccaggagtactcagag

SEQ ID NO: 4823 - DNA, 25 bp, Homo sapiens
tggcactgccaggagtactcagagc

SEQ ID NO: 4824 - DNA, 25 bp, Homo sapiens
ggcactgccaggagtactcagagct

SEQ ID NO: 4825 - DNA, 25 bp, Homo sapiens
gcactgccaggagtactcagagctc

SEQ ID NO: 4826 - DNA, 25 bp, Homo sapiens
cactgccaggagtactcagagctca

SEQ ID NO: 4827 - DNA, 25 bp, Homo sapiens
actgccaggagtactcagagctcaa

SEQ ID NO: 4828 - DNA, 25 bp, Homo sapiens
ctgccaggagtactcagagctcaaa

SEQ ID NO: 4829 - DNA, 25 bp, Homo sapiens
tgccaggagtactcagagctcaaag

SEQ ID NO: 4830 - DNA, 25 bp, Homo sapiens
gccaggagtactcagagctcaaagc

SEQ ID NO: 4831 - DNA, 25 bp, Homo sapiens
ccaggagtactcagagctcaaagct

SEQ ID NO: 4832 - DNA, 25 bp, Homo sapiens
caggagtactcagagctcaaagctg

SEQ ID NO: 4833 - DNA, 25 bp, Homo sapiens
aggagtactcagagctcaaagctgg

SEQ ID NO: 4834 - DNA, 25 bp, Homo sapiens
ggagtactcagagctcaaagctggg

SEQ ID NO: 4835 - DNA, 25 bp, Homo sapiens
gagtactcagagctcaaagctggga

SEQ ID NO: 4836 - DNA, 25 bp, Homo sapiens
agtactcagagctcaaagctgggat

SEQ ID NO: 4837 - DNA, 25 bp, Homo sapiens
gtactcagagctcaaagctgggatc

SEQ ID NO: 4838 - DNA, 25 bp, Homo sapiens
tactcagagctcaaagctgggatct

SEQ ID NO: 4839 - DNA, 25 bp, Homo sapiens
actcagagctcaaagctgggatctg

SEQ ID NO: 4840 - DNA, 25 bp, Homo sapiens
ctcagagctcaaagctgggatctgc

SEQ ID NO: 4841 - DNA, 25 bp, Homo sapiens
tcagagctcaaagctgggatctgca

SEQ ID NO: 4842 - DNA, 25 bp, Homo sapiens
cagagctcaaagctgggatctgcag

SEQ ID NO: 4843 - DNA, 25 bp, Homo sapiens
agagctcaaagctgggatctgcagt

SEQ ID NO: 4844 - DNA, 25 bp, Homo sapiens
gagctcaaagctgggatctgcagtc

SEQ ID NO: 4845 - DNA, 25 bp, Homo sapiens
agctcaaagctgggatctgcagtcc

SEQ ID NO: 4846 - DNA, 25 bp, Homo sapiens
gctcaaagctgggatctgcagtccc

SEQ ID NO: 4847 - DNA, 25 bp, Homo sapiens
ctcaaagctgggatctgcagtccct

SEQ ID NO: 4848 - DNA, 25 bp, Homo sapiens
tcaaagctgggatctgcagtccctt

SEQ ID NO: 4849 - DNA, 25 bp, Homo sapiens
caaagctgggatctgcagtccctta

SEQ ID NO: 4850 - DNA, 25 bp, Homo sapiens
aaagctgggatctgcagtcccttac

SEQ ID NO: 4851 - DNA, 25 bp, Homo sapiens
aagctgggatctgcagtcccttacc

SEQ ID NO: 4852 - DNA, 25 bp, Homo sapiens
agctgggatctgcagtcccttaccc

SEQ ID NO: 4853 - DNA, 25 bp, Homo sapiens
gctgggatctgcagtcccttaccca

SEQ ID NO: 4854 - DNA, 25 bp, Homo sapiens
ctgggatctgcagtcccttacccac

SEQ ID NO: 4855 - DNA, 25 bp, Homo sapiens
tgggatctgcagtcccttacccact

SEQ ID NO: 4856 - DNA, 25 bp, Homo sapiens
gggatctgcagtcccttacccactc

SEQ ID NO: 4857 - DNA, 25 bp, Homo sapiens
ggatctgcagtcccttacccactca

SEQ ID NO: 4858 - DNA, 25 bp, Homo sapiens
gatctgcagtcccttacccactcag

SEQ ID NO: 4859 - DNA, 25 bp, Homo sapiens
atctgcagtcccttacccactcagt

SEQ ID NO: 4860 - DNA, 25 bp, Homo sapiens
tctgcagtcccttacccactcagtg

SEQ ID NO: 4861 - DNA, 25 bp, Homo sapiens
ctgcagtcccttacccactcagtgc

SEQ ID NO: 4862 - DNA, 25 bp, Homo sapiens
tgcagtcccttacccactcagtgca

SEQ ID NO: 4863 - DNA, 25 bp, Homo sapiens
gcagtcccttacccactcagtgcac

SEQ ID NO: 4864 - DNA, 25 bp, Homo sapiens
cagtcccttacccactcagtgcacg

SEQ ID NO: 4865 - DNA, 25 bp, Homo sapiens
agtcccttacccactcagtgcacgc

SEQ ID NO: 4866 - DNA, 25 bp, Homo sapiens
gtcccttacccactcagtgcacgcc

SEQ ID NO: 4867 - DNA, 25 bp, Homo sapiens
tcccttacccactcagtgcacgccg

SEQ ID NO: 4868 - DNA, 25 bp, Homo sapiens
cccttacccactcagtgcacgccgc

SEQ ID NO: 4869 - DNA, 25 bp, Homo sapiens
ccttacccactcagtgcacgccgcc

SEQ ID NO: 4870 - DNA, 25 bp, Homo sapiens
cttacccactcagtgcacgccgcct

SEQ ID NO: 4871 - DNA, 25 bp, Homo sapiens
ttacccactcagtgcacgccgccta

SEQ ID NO: 4872 - DNA, 25 bp, Homo sapiens
tacccactcagtgcacgccgcctaa

SEQ ID NO: 4873 - DNA, 25 bp, Homo sapiens
acccactcagtgcacgccgcctaag

SEQ ID NO: 4874 - DNA, 25 bp, Homo sapiens
cccactcagtgcacgccgcctaagg

SEQ ID NO: 4875 - DNA, 25 bp, Homo sapiens
ccactcagtgcacgccgcctaaggc

SEQ ID NO: 4876 - DNA, 25 bp, Homo sapiens
cactcagtgcacgccgcctaaggct

SEQ ID NO: 4877 - DNA, 25 bp, Homo sapiens
actcagtgcacgccgcctaaggctt

SEQ ID NO: 4878 - DNA, 25 bp, Homo sapiens
ctcagtgcacgccgcctaaggcttt

SEQ ID NO: 4879 - DNA, 25 bp, Homo sapiens
tcagtgcacgccgcctaaggctttg

SEQ ID NO: 4880 - DNA, 25 bp, Homo sapiens
cagtgcacgccgcctaaggctttgc

SEQ ID NO: 4881 - DNA, 25 bp, Homo sapiens
agtgcacgccgcctaaggctttgcg

SEQ ID NO: 4882 - DNA, 25 bp, Homo sapiens
gtgcacgccgcctaaggctttgcgc

SEQ ID NO: 4883 - DNA, 25 bp, Homo sapiens
tgcacgccgcctaaggctttgcgct

SEQ ID NO: 4884 - DNA, 25 bp, Homo sapiens
gcacgccgcctaaggctttgcgctt

SEQ ID NO: 4885 - DNA, 25 bp, Homo sapiens
cacgccgcctaaggctttgcgcttc

SEQ ID NO: 4886 - DNA, 25 bp, Homo sapiens
acgccgcctaaggctttgcgcttca

SEQ ID NO: 4887 - DNA, 25 bp, Homo sapiens
cgccgcctaaggctttgcgcttcac

SEQ ID NO: 4888 - DNA, 25 bp, Homo sapiens
gccgcctaaggctttgcgcttcacc

SEQ ID NO: 4889 - DNA, 25 bp, Homo sapiens
ccgcctaaggctttgcgcttcacct

SEQ ID NO: 4890 - DNA, 25 bp, Homo sapiens
cgcctaaggctttgcgcttcacctt

SEQ ID NO: 4891 - DNA, 25 bp, Homo sapiens
gcctaaggctttgcgcttcaccttt

SEQ ID NO: 4892 - DNA, 25 bp, Homo sapiens
cctaaggctttgcgcttcaccttta

SEQ ID NO: 4893 - DNA, 25 bp, Homo sapiens
ctaaggctttgcgcttcacctttac

SEQ ID NO: 4894 - DNA, 25 bp, Homo sapiens
taaggctttgcgcttcacctttact

SEQ ID NO: 4895 - DNA, 25 bp, Homo sapiens
aaggctttgcgcttcacctttactc

SEQ ID NO: 4896 - DNA, 25 bp, Homo sapiens
aggctttgcgcttcacctttactca

SEQ ID NO: 4897 - DNA, 25 bp, Homo sapiens
ggctttgcgcttcacctttactcac

SEQ ID NO: 4898 - DNA, 25 bp, Homo sapiens
gctttgcgcttcacctttactcacc

SEQ ID NO: 4899 - DNA, 25 bp, Homo sapiens
ctttgcgcttcacctttactcacct

SEQ ID NO: 4900 - DNA, 25 bp, Homo sapiens
tttgcgcttcacctttactcacctc

SEQ ID NO: 4901 - DNA, 25 bp, Homo sapiens
ttgcgcttcacctttactcacctcg

SEQ ID NO: 4902 - DNA, 25 bp, Homo sapiens
tgcgcttcacctttactcacctcga

SEQ ID NO: 4903 - DNA, 25 bp, Homo sapiens
gcgcttcacctttactcacctcgaa

SEQ ID NO: 4904 - DNA, 25 bp, Homo sapiens
cgcttcacctttactcacctcgaag

SEQ ID NO: 4905 - DNA, 25 bp, Homo sapiens
gcttcacctttactcacctcgaagc

SEQ ID NO: 4906 - DNA, 25 bp, Homo sapiens
cttcacctttactcacctcgaagcc

SEQ ID NO: 4907 - DNA, 25 bp, Homo sapiens
ttcacctttactcacctcgaagccc

SEQ ID NO: 4908 - DNA, 25 bp, Homo sapiens
tcacctttactcacctcgaagccct

SEQ ID NO: 4909 - DNA, 25 bp, Homo sapiens
cacctttactcacctcgaagccctg

SEQ ID NO: 4910 - DNA, 25 bp, Homo sapiens
acctttactcacctcgaagccctgg

SEQ ID NO: 4911 - DNA, 25 bp, Homo sapiens
cctttactcacctcgaagccctgga

SEQ ID NO: 4912 - DNA, 25 bp, Homo sapiens
ctttactcacctcgaagccctggac

SEQ ID NO: 4913 - DNA, 25 bp, Homo sapiens
tttactcacctcgaagccctggaca

SEQ ID NO: 4914 - DNA, 25 bp, Homo sapiens
ttactcacctcgaagccctggacat

SEQ ID NO: 4915 - DNA, 25 bp, Homo sapiens
tactcacctcgaagccctggacatc

SEQ ID NO: 4916 - DNA, 25 bp, Homo sapiens
actcacctcgaagccctggacatcc

SEQ ID NO: 4917 - DNA, 25 bp, Homo sapiens
ctcacctcgaagccctggacatccg

SEQ ID NO: 4918 - DNA, 25 bp, Homo sapiens
tcacctcgaagccctggacatccgc

SEQ ID NO: 4919 - DNA, 25 bp, Homo sapiens
cacctcgaagccctggacatccgca

SEQ ID NO: 4920 - DNA, 25 bp, Homo sapiens
acctcgaagccctggacatccgcat

SEQ ID NO: 4921 - DNA, 25 bp, Homo sapiens
cctcgaagccctggacatccgcatc

SEQ ID NO: 4922 - DNA, 25 bp, Homo sapiens
ctcgaagccctggacatccgcatct

SEQ ID NO: 4923 - DNA, 25 bp, Homo sapiens
tcgaagccctggacatccgcatctg

SEQ ID NO: 4924 - DNA, 25 bp, Homo sapiens
cgaagccctggacatccgcatctgc

SEQ ID NO: 4925 - DNA, 25 bp, Homo sapiens
gaagccctggacatccgcatctgcc

SEQ ID NO: 4926 - DNA, 25 bp, Homo sapiens
aagccctggacatccgcatctgccc

SEQ ID NO: 4927 - DNA, 25 bp, Homo sapiens
agccctggacatccgcatctgccct

SEQ ID NO: 4928 - DNA, 25 bp, Homo sapiens
gccctggacatccgcatctgcccta

SEQ ID NO: 4929 - DNA, 25 bp, Homo sapiens
ccctggacatccgcatctgccctaa

SEQ ID NO: 4930 - DNA, 25 bp, Homo sapiens
cctggacatccgcatctgccctaag

SEQ ID NO: 4931 - DNA, 25 bp, Homo sapiens
ctggacatccgcatctgccctaaga

SEQ ID NO: 4932 - DNA, 25 bp, Homo sapiens
tggacatccgcatctgccctaagac

SEQ ID NO: 4933 - DNA, 25 bp, Homo sapiens
ggacatccgcatctgccctaagact

SEQ ID NO: 4934 - DNA, 25 bp, Homo sapiens
gacatccgcatctgccctaagactt

SEQ ID NO: 4935 - DNA, 25 bp, Homo sapiens
acatccgcatctgccctaagacttc

SEQ ID NO: 4936 - DNA, 25 bp, Homo sapiens
catccgcatctgccctaagacttct

SEQ ID NO: 4937 - DNA, 25 bp, Homo sapiens
atccgcatctgccctaagacttctc

SEQ ID NO: 4938 - DNA, 25 bp, Homo sapiens
tccgcatctgccctaagacttctca

SEQ ID NO: 4939 - DNA, 25 bp, Homo sapiens
ccgcatctgccctaagacttctcac

SEQ ID NO: 4940 - DNA, 25 bp, Homo sapiens
cgcatctgccctaagacttctcacc

SEQ ID NO: 4941 - DNA, 25 bp, Homo sapiens
gcatctgccctaagacttctcacct

SEQ ID NO: 4942 - DNA, 25 bp, Homo sapiens
catctgccctaagacttctcacctc

SEQ ID NO: 4943 - DNA, 25 bp, Homo sapiens
atctgccctaagacttctcacctca

SEQ ID NO: 4944 - DNA, 25 bp, Homo sapiens
tctgccctaagacttctcacctcag

SEQ ID NO: 4945 - DNA, 25 bp, Homo sapiens
ctgccctaagacttctcacctcagt

SEQ ID NO: 4946 - DNA, 25 bp, Homo sapiens
tgccctaagacttctcacctcagta

SEQ ID NO: 4947 - DNA, 25 bp, Homo sapiens
gccctaagacttctcacctcagtag

SEQ ID NO: 4948 - DNA, 25 bp, Homo sapiens
ccctaagacttctcacctcagtagc

SEQ ID NO: 4949 - DNA, 25 bp, Homo sapiens
cctaagacttctcacctcagtagca

SEQ ID NO: 4950 - DNA, 25 bp, Homo sapiens
ctaagacttctcacctcagtagcag

SEQ ID NO: 4951 - DNA, 25 bp, Homo sapiens
taagacttctcacctcagtagcaga

SEQ ID NO: 4952 - DNA, 25 bp, Homo sapiens
aagacttctcacctcagtagcagaa

SEQ ID NO: 4953 - DNA, 25 bp, Homo sapiens
agacttctcacctcagtagcagaag

SEQ ID NO: 4954 - DNA, 25 bp, Homo sapiens
gacttctcacctcagtagcagaagg

SEQ ID NO: 4955 - DNA, 25 bp, Homo sapiens
acttctcacctcagtagcagaagga

SEQ ID NO: 4956 - DNA, 25 bp, Homo sapiens
cttctcacctcagtagcagaaggaa

SEQ ID NO: 4957 - DNA, 25 bp, Homo sapiens
ttctcacctcagtagcagaaggaag

SEQ ID NO: 4958 - DNA, 25 bp, Homo sapiens
tctcacctcagtagcagaaggaagt

SEQ ID NO: 4959 - DNA, 25 bp, Homo sapiens
ctcacctcagtagcagaaggaagtc

SEQ ID NO: 4960 - DNA, 25 bp, Homo sapiens
tcacctcagtagcagaaggaagtcg

SEQ ID NO: 4961 - DNA, 25 bp, Homo sapiens
cacctcagtagcagaaggaagtcgc

SEQ ID NO: 4962 - DNA, 25 bp, Homo sapiens
acctcagtagcagaaggaagtcgcg

SEQ ID NO: 4963 - DNA, 25 bp, Homo sapiens
cctcagtagcagaaggaagtcgcgt

SEQ ID NO: 4964 - DNA, 25 bp, Homo sapiens
ctcagtagcagaaggaagtcgcgtc

SEQ ID NO: 4965 - DNA, 25 bp, Homo sapiens
tcagtagcagaaggaagtcgcgtca

SEQ ID NO: 4966 - DNA, 25 bp, Homo sapiens
cagtagcagaaggaagtcgcgtcag

SEQ ID NO: 4967 - DNA, 25 bp, Homo sapiens
agtagcagaaggaagtcgcgtcagc

SEQ ID NO: 4968 - DNA, 25 bp, Homo sapiens
gtagcagaaggaagtcgcgtcagct

SEQ ID NO: 4969 - DNA, 25 bp, Homo sapiens
tagcagaaggaagtcgcgtcagctg

SEQ ID NO: 4970 - DNA, 25 bp, Homo sapiens
agcagaaggaagtcgcgtcagctgg

SEQ ID NO: 4971 - DNA, 25 bp, Homo sapiens
gcagaaggaagtcgcgtcagctggc

SEQ ID NO: 4972 - DNA, 25 bp, Homo sapiens
cagaaggaagtcgcgtcagctggcc

SEQ ID NO: 4973 - DNA, 25 bp, Homo sapiens
agaaggaagtcgcgtcagctggcca

SEQ ID NO: 4974 - DNA, 25 bp, Homo sapiens
gaaggaagtcgcgtcagctggccac

SEQ ID NO: 4975 - DNA, 25 bp, Homo sapiens
aaggaagtcgcgtcagctggccaca

SEQ ID NO: 4976 - DNA, 25 bp, Homo sapiens
aggaagtcgcgtcagctggccacag

SEQ ID NO: 4977 - DNA, 25 bp, Homo sapiens
ggaagtcgcgtcagctggccacagc

SEQ ID NO: 4978 - DNA, 25 bp, Homo sapiens
gaagtcgcgtcagctggccacagcc

SEQ ID NO: 4979 - DNA, 25 bp, Homo sapiens
aagtcgcgtcagctggccacagcct

SEQ ID NO: 4980 - DNA, 25 bp, Homo sapiens
agtcgcgtcagctggccacagcctc

SEQ ID NO: 4981 - DNA, 25 bp, Homo sapiens
gtcgcgtcagctggccacagcctct

SEQ ID NO: 4982 - DNA, 25 bp, Homo sapiens
tcgcgtcagctggccacagcctctc

SEQ ID NO: 4983 - DNA, 25 bp, Homo sapiens
cgcgtcagctggccacagcctctct

SEQ ID NO: 4984 - DNA, 25 bp, Homo sapiens
gcgtcagctggccacagcctctctc

SEQ ID NO: 4985 - DNA, 25 bp, Homo sapiens
cgtcagctggccacagcctctctcc

SEQ ID NO: 4986 - DNA, 25 bp, Homo sapiens
gtcagctggccacagcctctctcct

SEQ ID NO: 4987 - DNA, 25 bp, Homo sapiens
tcagctggccacagcctctctccta

SEQ ID NO: 4988 - DNA, 25 bp, Homo sapiens
cagctggccacagcctctctcctag

SEQ ID NO: 4989 - DNA, 25 bp, Homo sapiens
agctggccacagcctctctcctagg

SEQ ID NO: 4990 - DNA, 25 bp, Homo sapiens
gctggccacagcctctctcctagga

SEQ ID NO: 4991 - DNA, 25 bp, Homo sapiens
ctggccacagcctctctcctaggag

SEQ ID NO: 4992 - DNA, 25 bp, Homo sapiens
tggccacagcctctctcctaggaga

SEQ ID NO: 4993 - DNA, 25 bp, Homo sapiens
ggccacagcctctctcctaggagac

SEQ ID NO: 4994 - DNA, 25 bp, Homo sapiens
gccacagcctctctcctaggagacc

SEQ ID NO: 4995 - DNA, 25 bp, Homo sapiens
ccacagcctctctcctaggagaccg

SEQ ID NO: 4996 - DNA, 25 bp, Homo sapiens
cacagcctctctcctaggagaccgt

SEQ ID NO: 4997 - DNA, 25 bp, Homo sapiens
acagcctctctcctaggagaccgtc

SEQ ID NO: 4998 - DNA, 25 bp, Homo sapiens
cagcctctctcctaggagaccgtcc

SEQ ID NO: 4999 - DNA, 25 bp, Homo sapiens
agcctctctcctaggagaccgtccg

SEQ ID NO: 5000 - DNA, 25 bp, Homo sapiens
gcctctctcctaggagaccgtccgg

SEQ ID NO: 5001 - DNA, 25 bp, Homo sapiens
cctctctcctaggagaccgtccggg

SEQ ID NO: 5002 - DNA, 25 bp, Homo sapiens
ctctctcctaggagaccgtccggga

SEQ ID NO: 5003 - DNA, 25 bp, Homo sapiens
tctctcctaggagaccgtccgggaa

SEQ ID NO: 5004 - DNA, 25 bp, Homo sapiens
ctctcctaggagaccgtccgggaaa

SEQ ID NO: 5005 - DNA, 25 bp, Homo sapiens
tctcctaggagaccgtccgggaaaa

SEQ ID NO: 5006 - DNA, 25 bp, Homo sapiens
ctcctaggagaccgtccgggaaaag

SEQ ID NO: 5007 - DNA, 25 bp, Homo sapiens
tcctaggagaccgtccgggaaaagc

SEQ ID NO: 5008 - DNA, 25 bp, Homo sapiens
cctaggagaccgtccgggaaaagcg

SEQ ID NO: 5009 - DNA, 25 bp, Homo sapiens
ctaggagaccgtccgggaaaagcga

SEQ ID NO: 5010 - DNA, 25 bp, Homo sapiens
taggagaccgtccgggaaaagcgag

SEQ ID NO: 5011 - DNA, 25 bp, Homo sapiens
aggagaccgtccgggaaaagcgagt

SEQ ID NO: 5012 - DNA, 25 bp, Homo sapiens
ggagaccgtccgggaaaagcgagtc

SEQ ID NO: 5013 - DNA, 25 bp, Homo sapiens
gagaccgtccgggaaaagcgagtca

SEQ ID NO: 5014 - DNA, 25 bp, Homo sapiens
agaccgtccgggaaaagcgagtcag

SEQ ID NO: 5015 - DNA, 25 bp, Homo sapiens
gaccgtccgggaaaagcgagtcagg

SEQ ID NO: 5016 - DNA, 25 bp, Homo sapiens
accgtccgggaaaagcgagtcaggg

SEQ ID NO: 5017 - DNA, 25 bp, Homo sapiens
ccgtccgggaaaagcgagtcagggt

SEQ ID NO: 5018 - DNA, 25 bp, Homo sapiens
cgtccgggaaaagcgagtcagggta

SEQ ID NO: 5019 - DNA, 25 bp, Homo sapiens
gtccgggaaaagcgagtcagggtag

SEQ ID NO: 5020 - DNA, 25 bp, Homo sapiens
tccgggaaaagcgagtcagggtaga

SEQ ID NO: 5021 - DNA, 25 bp, Homo sapiens
ccgggaaaagcgagtcagggtagac

SEQ ID NO: 5022 - DNA, 25 bp, Homo sapiens
cgggaaaagcgagtcagggtagacc

SEQ ID NO: 5023 - DNA, 25 bp, Homo sapiens
gggaaaagcgagtcagggtagaccc

SEQ ID NO: 5024 - DNA, 25 bp, Homo sapiens
ggaaaagcgagtcagggtagaccct

SEQ ID NO: 5025 - DNA, 25 bp, Homo sapiens
gaaaagcgagtcagggtagaccctg

SEQ ID NO: 5026 - DNA, 25 bp, Homo sapiens
aaaagcgagtcagggtagaccctga

SEQ ID NO: 5027 - DNA, 25 bp, Homo sapiens
aaagcgagtcagggtagaccctgag

SEQ ID NO: 5028 - DNA, 25 bp, Homo sapiens
aagcgagtcagggtagaccctgagg

SEQ ID NO: 5029 - DNA, 25 bp, Homo sapiens
agcgagtcagggtagaccctgaggc

SEQ ID NO: 5030 - DNA, 25 bp, Homo sapiens
gcgagtcagggtagaccctgaggcc

SEQ ID NO: 5031 - DNA, 25 bp, Homo sapiens
cgagtcagggtagaccctgaggccc

SEQ ID NO: 5032 - DNA, 25 bp, Homo sapiens
gagtcagggtagaccctgaggcccc

SEQ ID NO: 5033 - DNA, 25 bp, Homo sapiens
agtcagggtagaccctgaggcccct

SEQ ID NO: 5034 - DNA, 25 bp, Homo sapiens
gtcagggtagaccctgaggcccctc

SEQ ID NO: 5035 - DNA, 25 bp, Homo sapiens
tcagggtagaccctgaggcccctca

SEQ ID NO: 5036 - DNA, 25 bp, Homo sapiens
cagggtagaccctgaggcccctcag

SEQ ID NO: 5037 - DNA, 25 bp, Homo sapiens
agggtagaccctgaggcccctcagc

SEQ ID NO: 5038 - DNA, 25 bp, Homo sapiens
gggtagaccctgaggcccctcagct

SEQ ID NO: 5039 - DNA, 25 bp, Homo sapiens
ggtagaccctgaggcccctcagctc

SEQ ID NO: 5040 - DNA, 25 bp, Homo sapiens
gtagaccctgaggcccctcagctcc

SEQ ID NO: 5041 - DNA, 25 bp, Homo sapiens
tagaccctgaggcccctcagctccg

SEQ ID NO: 5042 - DNA, 25 bp, Homo sapiens
agaccctgaggcccctcagctccgg

SEQ ID NO: 5043 - DNA, 25 bp, Homo sapiens
gaccctgaggcccctcagctccggc

SEQ ID NO: 5044 - DNA, 25 bp, Homo sapiens
accctgaggcccctcagctccggct

SEQ ID NO: 5045 - DNA, 25 bp, Homo sapiens
ccctgaggcccctcagctccggcta

SEQ ID NO: 5046 - DNA, 25 bp, Homo sapiens
cctgaggcccctcagctccggctat

SEQ ID NO: 5047 - DNA, 25 bp, Homo sapiens
ctgaggcccctcagctccggctatt

SEQ ID NO: 5048 - DNA, 25 bp, Homo sapiens
tgaggcccctcagctccggctattt

SEQ ID NO: 5049 - DNA, 25 bp, Homo sapiens
gaggcccctcagctccggctatttt

SEQ ID NO: 5050 - DNA, 25 bp, Homo sapiens
aggcccctcagctccggctattttc

SEQ ID NO: 5051 - DNA, 25 bp, Homo sapiens
ggcccctcagctccggctattttca

SEQ ID NO: 5052 - DNA, 25 bp, Homo sapiens
gcccctcagctccggctattttcag

SEQ ID NO: 5053 - DNA, 25 bp, Homo sapiens
cccctcagctccggctattttcaga

SEQ ID NO: 5054 - DNA, 25 bp, Homo sapiens
ccctcagctccggctattttcagat

SEQ ID NO: 5055 - DNA, 25 bp, Homo sapiens
cctcagctccggctattttcagatc

SEQ ID NO: 5056 - DNA, 25 bp, Homo sapiens
ctcagctccggctattttcagatct

SEQ ID NO: 5057 - DNA, 25 bp, Homo sapiens
tcagctccggctattttcagatctg

SEQ ID NO: 5058 - DNA, 25 bp, Homo sapiens
cagctccggctattttcagatctgt

SEQ ID NO: 5059 - DNA, 25 bp, Homo sapiens
agctccggctattttcagatctgtc

SEQ ID NO: 5060 - DNA, 25 bp, Homo sapiens
gctccggctattttcagatctgtcg

SEQ ID NO: 5061 - DNA, 25 bp, Homo sapiens
ctccggctattttcagatctgtcgc

SEQ ID NO: 5062 - DNA, 25 bp, Homo sapiens
tccggctattttcagatctgtcgct

SEQ ID NO: 5063 - DNA, 25 bp, Homo sapiens
ccggctattttcagatctgtcgctc

SEQ ID NO: 5064 - DNA, 25 bp, Homo sapiens
cggctattttcagatctgtcgctcc

SEQ ID NO: 5065 - DNA, 25 bp, Homo sapiens
ggctattttcagatctgtcgctcct

SEQ ID NO: 5066 - DNA, 25 bp, Homo sapiens
gctattttcagatctgtcgctcctt

SEQ ID NO: 5067 - DNA, 25 bp, Homo sapiens
ctattttcagatctgtcgctccttc

SEQ ID NO: 5068 - DNA, 25 bp, Homo sapiens
tattttcagatctgtcgctccttca

SEQ ID NO: 5069 - DNA, 25 bp, Homo sapiens
attttcagatctgtcgctccttcac

SEQ ID NO: 5070 - DNA, 25 bp, Homo sapiens
ttttcagatctgtcgctccttcacc

SEQ ID NO: 5071 - DNA, 25 bp, Homo sapiens
tttcagatctgtcgctccttcaccc

SEQ ID NO: 5072 - DNA, 25 bp, Homo sapiens
ttcagatctgtcgctccttcaccct

SEQ ID NO: 5073 - DNA, 25 bp, Homo sapiens
tcagatctgtcgctccttcaccctc

SEQ ID NO: 5074 - DNA, 25 bp, Homo sapiens
cagatctgtcgctccttcaccctca

SEQ ID NO: 5075 - DNA, 25 bp, Homo sapiens
agatctgtcgctccttcaccctcag

SEQ ID NO: 5076 - DNA, 25 bp, Homo sapiens
gatctgtcgctccttcaccctcagc

SEQ ID NO: 5077 - DNA, 25 bp, Homo sapiens
atctgtcgctccttcaccctcagcc

SEQ ID NO: 5078 - DNA, 25 bp, Homo sapiens
tctgtcgctccttcaccctcagcct

SEQ ID NO: 5079 - DNA, 25 bp, Homo sapiens
ctgtcgctccttcaccctcagcctt

SEQ ID NO: 5080 - DNA, 25 bp, Homo sapiens
tgtcgctccttcaccctcagccttt

SEQ ID NO: 5081 - DNA, 25 bp, Homo sapiens
gtcgctccttcaccctcagcctttc

SEQ ID NO: 5082 - DNA, 25 bp, Homo sapiens
tcgctccttcaccctcagcctttca

SEQ ID NO: 5083 - DNA, 25 bp, Homo sapiens
cgctccttcaccctcagcctttcaa

SEQ ID NO: 5084 - DNA, 25 bp, Homo sapiens
gctccttcaccctcagcctttcaaa

SEQ ID NO: 5085 - DNA, 25 bp, Homo sapiens
ctccttcaccctcagcctttcaaac

SEQ ID NO: 5086 - DNA, 25 bp, Homo sapiens
tccttcaccctcagcctttcaaaca

SEQ ID NO: 5087 - DNA, 25 bp, Homo sapiens
ccttcaccctcagcctttcaaacag

SEQ ID NO: 5088 - DNA, 25 bp, Homo sapiens
cttcaccctcagcctttcaaacagg

SEQ ID NO: 5089 - DNA, 25 bp, Homo sapiens
ttcaccctcagcctttcaaacaggc

SEQ ID NO: 5090 - DNA, 25 bp, Homo sapiens
tcaccctcagcctttcaaacaggcc

SEQ ID NO: 5091 - DNA, 25 bp, Homo sapiens
caccctcagcctttcaaacaggcca

SEQ ID NO: 5092 - DNA, 25 bp, Homo sapiens
accctcagcctttcaaacaggccac

SEQ ID NO: 5093 - DNA, 25 bp, Homo sapiens
ccctcagcctttcaaacaggccact

SEQ ID NO: 5094 - DNA, 25 bp, Homo sapiens
cctcagcctttcaaacaggccactc

SEQ ID NO: 5095 - DNA, 25 bp, Homo sapiens
ctcagcctttcaaacaggccactcc

SEQ ID NO: 5096 - DNA, 25 bp, Homo sapiens
tcagcctttcaaacaggccactcca

SEQ ID NO: 5097 - DNA, 25 bp, Homo sapiens
cagcctttcaaacaggccactccaa

SEQ ID NO: 5098 - DNA, 25 bp, Homo sapiens
agcctttcaaacaggccactccaaa

SEQ ID NO: 5099 - DNA, 25 bp, Homo sapiens
gcctttcaaacaggccactccaaaa

SEQ ID NO: 5100 - DNA, 25 bp, Homo sapiens
cctttcaaacaggccactccaaaaa

SEQ ID NO: 5101 - DNA, 25 bp, Homo sapiens
ctttcaaacaggccactccaaaaaa

SEQ ID NO: 5102 - DNA, 25 bp, Homo sapiens
tttcaaacaggccactccaaaaaaa

SEQ ID NO: 5103 - DNA, 25 bp, Homo sapiens
ttcaaacaggccactccaaaaaaaa

SEQ ID NO: 5104 - DNA, 25 bp, Homo sapiens
tcaaacaggccactccaaaaaaaag

SEQ ID NO: 5105 - DNA, 25 bp, Homo sapiens
caaacaggccactccaaaaaaaagc

SEQ ID NO: 5106 - DNA, 25 bp, Homo sapiens
aaacaggccactccaaaaaaaagcc

SEQ ID NO: 5107 - DNA, 25 bp, Homo sapiens
aacaggccactccaaaaaaaagccc

SEQ ID NO: 5108 - DNA, 25 bp, Homo sapiens
acaggccactccaaaaaaaagccca

SEQ ID NO: 5109 - DNA, 25 bp, Homo sapiens
caggccactccaaaaaaaagcccaa

SEQ ID NO: 5110 - DNA, 25 bp, Homo sapiens
aggccactccaaaaaaaagcccaat

SEQ ID NO: 5111 - DNA, 25 bp, Homo sapiens
ggccactccaaaaaaaagcccaatc

SEQ ID NO: 5112 - DNA, 25 bp, Homo sapiens
gccactccaaaaaaaagcccaatca

SEQ ID NO: 5113 - DNA, 25 bp, Homo sapiens
ccactccaaaaaaaagcccaatcac

SEQ ID NO: 5114 - DNA, 25 bp, Homo sapiens
cactccaaaaaaaagcccaatcaca

SEQ ID NO: 5115 - DNA, 25 bp, Homo sapiens
actccaaaaaaaagcccaatcacag

SEQ ID NO: 5116 - DNA, 25 bp, Homo sapiens
ctccaaaaaaaagcccaatcacagc

SEQ ID NO: 5117 - DNA, 25 bp, Homo sapiens
tccaaaaaaaagcccaatcacagcc

SEQ ID NO: 5118 - DNA, 25 bp, Homo sapiens
ccaaaaaaaagcccaatcacagcct

SEQ ID NO: 5119 - DNA, 25 bp, Homo sapiens
caaaaaaaagcccaatcacagcctt

SEQ ID NO: 5120 - DNA, 25 bp, Homo sapiens
aaaaaaaagcccaatcacagccttc

SEQ ID NO: 5121 - DNA, 25 bp, Homo sapiens
aaaaaaagcccaatcacagccttcc

SEQ ID NO: 5122 - DNA, 25 bp, Homo sapiens
aaaaaagcccaatcacagccttcct

SEQ ID NO: 5123 - DNA, 25 bp, Homo sapiens
aaaaagcccaatcacagccttcctt

SEQ ID NO: 5124 - DNA, 25 bp, Homo sapiens
aaaagcccaatcacagccttccttc

SEQ ID NO: 5125 - DNA, 25 bp, Homo sapiens
aaagcccaatcacagccttccttct

SEQ ID NO: 5126 - DNA, 25 bp, Homo sapiens
aagcccaatcacagccttccttctt

SEQ ID NO: 5127 - DNA, 25 bp, Homo sapiens
agcccaatcacagccttccttcttc

SEQ ID NO: 5128 - DNA, 25 bp, Homo sapiens
gcccaatcacagccttccttcttct

SEQ ID NO: 5129 - DNA, 25 bp, Homo sapiens
cccaatcacagccttccttcttctc

SEQ ID NO: 5130 - DNA, 25 bp, Homo sapiens
ccaatcacagccttccttcttctcc

SEQ ID NO: 5131 - DNA, 25 bp, Homo sapiens
caatcacagccttccttcttctcct

SEQ ID NO: 5132 - DNA, 25 bp, Homo sapiens
aatcacagccttccttcttctcctg

SEQ ID NO: 5133 - DNA, 25 bp, Homo sapiens
atcacagccttccttcttctcctgg

SEQ ID NO: 5134 - DNA, 25 bp, Homo sapiens
tcacagccttccttcttctcctggc

SEQ ID NO: 5135 - DNA, 25 bp, Homo sapiens
cacagccttccttcttctcctggcc

SEQ ID NO: 5136 - DNA, 25 bp, Homo sapiens
acagccttccttcttctcctggcct

SEQ ID NO: 5137 - DNA, 25 bp, Homo sapiens
cagccttccttcttctcctggcctt

SEQ ID NO: 5138 - DNA, 25 bp, Homo sapiens
agccttccttcttctcctggccttc

SEQ ID NO: 5139 - DNA, 25 bp, Homo sapiens
gccttccttcttctcctggccttcc

SEQ ID NO: 5140 - DNA, 25 bp, Homo sapiens
ccttccttcttctcctggccttccg

SEQ ID NO: 5141 - DNA, 25 bp, Homo sapiens
cttccttcttctcctggccttccgg

SEQ ID NO: 5142 - DNA, 25 bp, Homo sapiens
ttccttcttctcctggccttccggc

SEQ ID NO: 5143 - DNA, 25 bp, Homo sapiens
tccttcttctcctggccttccggca

SEQ ID NO: 5144 - DNA, 25 bp, Homo sapiens
ccttcttctcctggccttccggcac

SEQ ID NO: 5145 - DNA, 25 bp, Homo sapiens
cttcttctcctggccttccggcact

SEQ ID NO: 5146 - DNA, 25 bp, Homo sapiens
ttcttctcctggccttccggcactg

SEQ ID NO: 5147 - DNA, 25 bp, Homo sapiens
tcttctcctggccttccggcactgt

SEQ ID NO: 5148 - DNA, 25 bp, Homo sapiens
cttctcctggccttccggcactgtc

SEQ ID NO: 5149 - DNA, 25 bp, Homo sapiens
ttctcctggccttccggcactgtcc

SEQ ID NO: 5150 - DNA, 25 bp, Homo sapiens
tctcctggccttccggcactgtcca

SEQ ID NO: 5151 - DNA, 25 bp, Homo sapiens
ctcctggccttccggcactgtccaa

SEQ ID NO: 5152 - DNA, 25 bp, Homo sapiens
tcctggccttccggcactgtccaat

SEQ ID NO: 5153 - DNA, 25 bp, Homo sapiens
cctggccttccggcactgtccaatc

SEQ ID NO: 5154 - DNA, 25 bp, Homo sapiens
ctggccttccggcactgtccaatca

SEQ ID NO: 5155 - DNA, 25 bp, Homo sapiens
tggccttccggcactgtccaatcaa

SEQ ID NO: 5156 - DNA, 25 bp, Homo sapiens
ggccttccggcactgtccaatcaac

SEQ ID NO: 5157 - DNA, 25 bp, Homo sapiens
gccttccggcactgtccaatcaacg

SEQ ID NO: 5158 - DNA, 25 bp, Homo sapiens
ccttccggcactgtccaatcaacgt

SEQ ID NO: 5159 - DNA, 25 bp, Homo sapiens
cttccggcactgtccaatcaacgta

SEQ ID NO: 5160 - DNA, 25 bp, Homo sapiens
ttccggcactgtccaatcaacgtac

SEQ ID NO: 5161 - DNA, 25 bp, Homo sapiens
tccggcactgtccaatcaacgtacg

SEQ ID NO: 5162 - DNA, 25 bp, Homo sapiens
ccggcactgtccaatcaacgtacgc

SEQ ID NO: 5163 - DNA, 25 bp, Homo sapiens
cggcactgtccaatcaacgtacgcc

SEQ ID NO: 5164 - DNA, 25 bp, Homo sapiens
ggcactgtccaatcaacgtacgcca

SEQ ID NO: 5165 - DNA, 25 bp, Homo sapiens
gcactgtccaatcaacgtacgccat

SEQ ID NO: 5166 - DNA, 25 bp, Homo sapiens
cactgtccaatcaacgtacgccatc

SEQ ID NO: 5167 - DNA, 25 bp, Homo sapiens
actgtccaatcaacgtacgccatct

SEQ ID NO: 5168 - DNA, 25 bp, Homo sapiens
ctgtccaatcaacgtacgccatcta

SEQ ID NO: 5169 - DNA, 25 bp, Homo sapiens
tgtccaatcaacgtacgccatctat

SEQ ID NO: 5170 - DNA, 25 bp, Homo sapiens
gtccaatcaacgtacgccatctatc

SEQ ID NO: 5171 - DNA, 17 bp, Homo sapiens
atatttgcatgttccct

SEQ ID NO: 5172 - DNA, 17 bp, Homo sapiens
tatttgcatgttccctg

SEQ ID NO: 5173 - DNA, 17 bp, Homo sapiens
atttgcatgttccctgg

SEQ ID NO: 5174 - DNA, 17 bp, Homo sapiens
tttgcatgttccctgga

SEQ ID NO: 5175 - DNA, 17 bp, Homo sapiens
ttgcatgttccctggat

SEQ ID NO: 5176 - DNA, 17 bp, Homo sapiens
tgcatgttccctggatt

SEQ ID NO: 5177 - DNA, 17 bp, Homo sapiens
gcatgttccctggattt

SEQ ID NO: 5178 - DNA, 17 bp, Homo sapiens
catgttccctggatttt

SEQ ID NO: 5179 - DNA, 17 bp, Homo sapiens
atgttccctggattttg

SEQ ID NO: 5180 - DNA, 17 bp, Homo sapiens
tgttccctggattttgt

SEQ ID NO: 5181 - DNA, 17 bp, Homo sapiens
gttccctggattttgta

SEQ ID NO: 5182 - DNA, 17 bp, Homo sapiens
ttccctggattttgtat

SEQ ID NO: 5183 - DNA, 17 bp, Homo sapiens
tccctggattttgtatt

SEQ ID NO: 5184 - DNA, 17 bp, Homo sapiens
ccctggattttgtattt

SEQ ID NO: 5185 - DNA, 17 bp, Homo sapiens
cctggattttgtatttt

SEQ ID NO: 5186 - DNA, 17 bp, Homo sapiens
ctggattttgtattttt

SEQ ID NO: 5187 - DNA, 17 bp, Homo sapiens
tggattttgtatttttt

SEQ ID NO: 5188 - DNA, 17 bp, Homo sapiens
ggattttgtattttttg

SEQ ID NO: 5189 - DNA, 17 bp, Homo sapiens
gattttgtattttttga

SEQ ID NO: 5190 - DNA, 17 bp, Homo sapiens
attttgtattttttgat

SEQ ID NO: 5191 - DNA, 17 bp, Homo sapiens
ttttgtattttttgata

SEQ ID NO: 5192 - DNA, 17 bp, Homo sapiens
tttgtattttttgataa

SEQ ID NO: 5193 - DNA, 17 bp, Homo sapiens
ttgtattttttgataaa

SEQ ID NO: 5194 - DNA, 17 bp, Homo sapiens
tgtattttttgataaag

SEQ ID NO: 5195 - DNA, 17 bp, Homo sapiens
gtattttttgataaaga

SEQ ID NO: 5196 - DNA, 17 bp, Homo sapiens
tattttttgataaagat

SEQ ID NO: 5197 - DNA, 17 bp, Homo sapiens
attttttgataaagata

SEQ ID NO: 5198 - DNA, 17 bp, Homo sapiens
ttttttgataaagatat

SEQ ID NO: 5199 - DNA, 17 bp, Homo sapiens
tttttgataaagatata

SEQ ID NO: 5200 - DNA, 17 bp, Homo sapiens
ttttgataaagatatat

SEQ ID NO: 5201 - DNA, 17 bp, Homo sapiens
tttgataaagatatatt

SEQ ID NO: 5202 - DNA, 17 bp, Homo sapiens
ttgataaagatatattc

SEQ ID NO: 5203 - DNA, 17 bp, Homo sapiens
tgataaagatatattct

SEQ ID NO: 5204 - DNA, 17 bp, Homo sapiens
gataaagatatattctt

SEQ ID NO: 5205 - DNA, 17 bp, Homo sapiens
ataaagatatattcttg

SEQ ID NO: 5206 - DNA, 17 bp, Homo sapiens
taaagatatattcttgg

SEQ ID NO: 5207 - DNA, 17 bp, Homo sapiens
aaagatatattcttggg

SEQ ID NO: 5208 - DNA, 17 bp, Homo sapiens
aagatatattcttgggc

SEQ ID NO: 5209 - DNA, 17 bp, Homo sapiens
agatatattcttgggcc

SEQ ID NO: 5210 - DNA, 17 bp, Homo sapiens
gatatattcttgggcca

SEQ ID NO: 5211 - DNA, 17 bp, Homo sapiens
atatattcttgggccac

SEQ ID NO: 5212 - DNA, 17 bp, Homo sapiens
tatattcttgggccaca

SEQ ID NO: 5213 - DNA, 17 bp, Homo sapiens
atattcttgggccacag

SEQ ID NO: 5214 - DNA, 17 bp, Homo sapiens
tattcttgggccacagt

SEQ ID NO: 5215 - DNA, 17 bp, Homo sapiens
attcttgggccacagta

SEQ ID NO: 5216 - DNA, 17 bp, Homo sapiens
ttcttgggccacagtag

SEQ ID NO: 5217 - DNA, 17 bp, Homo sapiens
tcttgggccacagtagc

SEQ ID NO: 5218 - DNA, 17 bp, Homo sapiens
cttgggccacagtagct

SEQ ID NO: 5219 - DNA, 17 bp, Homo sapiens
ttgggccacagtagctg

SEQ ID NO: 5220 - DNA, 17 bp, Homo sapiens
tgggccacagtagctgg

SEQ ID NO: 5221 - DNA, 17 bp, Homo sapiens
gggccacagtagctgga

SEQ ID NO: 5222 - DNA, 17 bp, Homo sapiens
ggccacagtagctggag

SEQ ID NO: 5223 - DNA, 17 bp, Homo sapiens
gccacagtagctggaga

SEQ ID NO: 5224 - DNA, 17 bp, Homo sapiens
ccacagtagctggagat

SEQ ID NO: 5225 - DNA, 17 bp, Homo sapiens
cacagtagctggagata

SEQ ID NO: 5226 - DNA, 17 bp, Homo sapiens
acagtagctggagatat

SEQ ID NO: 5227 - DNA, 17 bp, Homo sapiens
cagtagctggagatata

SEQ ID NO: 5228 - DNA, 17 bp, Homo sapiens
agtagctggagatataa

SEQ ID NO: 5229 - DNA, 17 bp, Homo sapiens
gtagctggagatataat

SEQ ID NO: 5230 - DNA, 17 bp, Homo sapiens
tagctggagatataatg

SEQ ID NO: 5231 - DNA, 17 bp, Homo sapiens
agctggagatataatgc

SEQ ID NO: 5232 - DNA, 17 bp, Homo sapiens
gctggagatataatgcc

SEQ ID NO: 5233 - DNA, 17 bp, Homo sapiens
ctggagatataatgccg

SEQ ID NO: 5234 - DNA, 17 bp, Homo sapiens
tggagatataatgccgg

SEQ ID NO: 5235 - DNA, 17 bp, Homo sapiens
ggagatataatgccgga

SEQ ID NO: 5236 - DNA, 17 bp, Homo sapiens
gagatataatgccggag

SEQ ID NO: 5237 - DNA, 17 bp, Homo sapiens
agatataatgccggagg

SEQ ID NO: 5238 - DNA, 17 bp, Homo sapiens
gatataatgccggagga

SEQ ID NO: 5239 - DNA, 17 bp, Homo sapiens
atataatgccggaggat

SEQ ID NO: 5240 - DNA, 17 bp, Homo sapiens
tataatgccggaggatt

SEQ ID NO: 5241 - DNA, 17 bp, Homo sapiens
ataatgccggaggattc

SEQ ID NO: 5242 - DNA, 17 bp, Homo sapiens
taatgccggaggattct

SEQ ID NO: 5243 - DNA, 17 bp, Homo sapiens
aatgccggaggattctt

SEQ ID NO: 5244 - DNA, 17 bp, Homo sapiens
atgccggaggattcttt

SEQ ID NO: 5245 - DNA, 17 bp, Homo sapiens
tgccggaggattctttt

SEQ ID NO: 5246 - DNA, 17 bp, Homo sapiens
gccggaggattcttttt

SEQ ID NO: 5247 - DNA, 17 bp, Homo sapiens
ccggaggattctttttt

SEQ ID NO: 5248 - DNA, 17 bp, Homo sapiens
cggaggattcttttttt

SEQ ID NO: 5249 - DNA, 17 bp, Homo sapiens
ggaggattctttttttt

SEQ ID NO: 5250 - DNA, 17 bp, Homo sapiens
gaggattcttttttttt

SEQ ID NO: 5251 - DNA, 17 bp, Homo sapiens
aggattctttttttttt

SEQ ID NO: 5252 - DNA, 17 bp, Homo sapiens
ggattcttttttttttt

SEQ ID NO: 5253 - DNA, 17 bp, Homo sapiens
gattctttttttttttt

SEQ ID NO: 5254 - DNA, 17 bp, Homo sapiens
attcttttttttttttt

SEQ ID NO: 5255 - DNA, 17 bp, Homo sapiens
ttctttttttttttttt

SEQ ID NO: 5256 - DNA, 17 bp, Homo sapiens
tcttttttttttttttt

SEQ ID NO: 5257 - DNA, 17 bp, Homo sapiens
ctttttttttttttttt

SEQ ID NO: 5258 - DNA, 17 bp, Homo sapiens
ttttttttttttttttg

SEQ ID NO: 5259 - DNA, 17 bp, Homo sapiens
tttttttttttttttga

SEQ ID NO: 5260 - DNA, 17 bp, Homo sapiens
ttttttttttttttgag

SEQ ID NO: 5261 - DNA, 17 bp, Homo sapiens
tttttttttttttgaga

SEQ ID NO: 5262 - DNA, 17 bp, Homo sapiens
ttttttttttttgagac

SEQ ID NO: 5263 - DNA, 17 bp, Homo sapiens
tttttttttttgagaca

SEQ ID NO: 5264 - DNA, 17 bp, Homo sapiens
ttttttttttgagacag

SEQ ID NO: 5265 - DNA, 17 bp, Homo sapiens
tttttttttgagacaga

SEQ ID NO: 5266 - DNA, 17 bp, Homo sapiens
ttttttttgagacagag

SEQ ID NO: 5267 - DNA, 17 bp, Homo sapiens
tttttttgagacagagt

SEQ ID NO: 5268 - DNA, 17 bp, Homo sapiens
ttttttgagacagagtc

SEQ ID NO: 5269 - DNA, 17 bp, Homo sapiens
tttttgagacagagtct

SEQ ID NO: 5270 - DNA, 17 bp, Homo sapiens
ttttgagacagagtctg

SEQ ID NO: 5271 - DNA, 17 bp, Homo sapiens
tttgagacagagtctgt

SEQ ID NO: 5272 - DNA, 17 bp, Homo sapiens
ttgagacagagtctgtc

SEQ ID NO: 5273 - DNA, 17 bp, Homo sapiens
tgagacagagtctgtct

SEQ ID NO: 5274 - DNA, 17 bp, Homo sapiens
gagacagagtctgtctc

SEQ ID NO: 5275 - DNA, 17 bp, Homo sapiens
agacagagtctgtctct

SEQ ID NO: 5276 - DNA, 17 bp, Homo sapiens
gacagagtctgtctcta

SEQ ID NO: 5277 - DNA, 17 bp, Homo sapiens
acagagtctgtctctat

SEQ ID NO: 5278 - DNA, 17 bp, Homo sapiens
cagagtctgtctctatt

SEQ ID NO: 5279 - DNA, 17 bp, Homo sapiens
agagtctgtctctattg

SEQ ID NO: 5280 - DNA, 17 bp, Homo sapiens
gagtctgtctctattgc

SEQ ID NO: 5281 - DNA, 17 bp, Homo sapiens
agtctgtctctattgcc

SEQ ID NO: 5282 - DNA, 17 bp, Homo sapiens
gtctgtctctattgcct

SEQ ID NO: 5283 - DNA, 17 bp, Homo sapiens
tctgtctctattgcctg

SEQ ID NO: 5284 - DNA, 17 bp, Homo sapiens
ctgtctctattgcctgg

SEQ ID NO: 5285 - DNA, 17 bp, Homo sapiens
tgtctctattgcctggg

SEQ ID NO: 5286 - DNA, 17 bp, Homo sapiens
gtctctattgcctgggc

SEQ ID NO: 5287 - DNA, 17 bp, Homo sapiens
tctctattgcctgggct

SEQ ID NO: 5288 - DNA, 17 bp, Homo sapiens
ctctattgcctgggctg

SEQ ID NO: 5289 - DNA, 17 bp, Homo sapiens
tctattgcctgggctgg

SEQ ID NO: 5290 - DNA, 17 bp, Homo sapiens
ctattgcctgggctgga

SEQ ID NO: 5291 - DNA, 17 bp, Homo sapiens
tattgcctgggctggag

SEQ ID NO: 5292 - DNA, 17 bp, Homo sapiens
attgcctgggctggagt

SEQ ID NO: 5293 - DNA, 17 bp, Homo sapiens
ttgcctgggctggagtg

SEQ ID NO: 5294 - DNA, 17 bp, Homo sapiens
tgcctgggctggagtgc

SEQ ID NO: 5295 - DNA, 17 bp, Homo sapiens
gcctgggctggagtgca

SEQ ID NO: 5296 - DNA, 17 bp, Homo sapiens
cctgggctggagtgcag

SEQ ID NO: 5297 - DNA, 17 bp, Homo sapiens
ctgggctggagtgcagt

SEQ ID NO: 5298 - DNA, 17 bp, Homo sapiens
tgggctggagtgcagtg

SEQ ID NO: 5299 - DNA, 17 bp, Homo sapiens
gggctggagtgcagtgg

SEQ ID NO: 5300 - DNA, 17 bp, Homo sapiens
ggctggagtgcagtggc

SEQ ID NO: 5301 - DNA, 17 bp, Homo sapiens
gctggagtgcagtggcc

SEQ ID NO: 5302 - DNA, 17 bp, Homo sapiens
ctggagtgcagtggccc

SEQ ID NO: 5303 - DNA, 17 bp, Homo sapiens
tggagtgcagtggccca

SEQ ID NO: 5304 - DNA, 17 bp, Homo sapiens
ggagtgcagtggcccaa

SEQ ID NO: 5305 - DNA, 17 bp, Homo sapiens
gagtgcagtggcccaag

SEQ ID NO: 5306 - DNA, 17 bp, Homo sapiens
agtgcagtggcccaagc

SEQ ID NO: 5307 - DNA, 17 bp, Homo sapiens
gtgcagtggcccaagct

SEQ ID NO: 5308 - DNA, 17 bp, Homo sapiens
tgcagtggcccaagcta

SEQ ID NO: 5309 - DNA, 17 bp, Homo sapiens
gcagtggcccaagctac

SEQ ID NO: 5310 - DNA, 17 bp, Homo sapiens
cagtggcccaagctacg

SEQ ID NO: 5311 - DNA, 17 bp, Homo sapiens
agtggcccaagctacgc

SEQ ID NO: 5312 - DNA, 17 bp, Homo sapiens
gtggcccaagctacgct

SEQ ID NO: 5313 - DNA, 17 bp, Homo sapiens
tggcccaagctacgctc

SEQ ID NO: 5314 - DNA, 17 bp, Homo sapiens
ggcccaagctacgctca

SEQ ID NO: 5315 - DNA, 17 bp, Homo sapiens
gcccaagctacgctcac

SEQ ID NO: 5316 - DNA, 17 bp, Homo sapiens
cccaagctacgctcact

SEQ ID NO: 5317 - DNA, 17 bp, Homo sapiens
ccaagctacgctcactg

SEQ ID NO: 5318 - DNA, 17 bp, Homo sapiens
caagctacgctcactgc

SEQ ID NO: 5319 - DNA, 17 bp, Homo sapiens
aagctacgctcactgca

SEQ ID NO: 5320 - DNA, 17 bp, Homo sapiens
agctacgctcactgcaa

SEQ ID NO: 5321 - DNA, 17 bp, Homo sapiens
gctacgctcactgcaag

SEQ ID NO: 5322 - DNA, 17 bp, Homo sapiens
ctacgctcactgcaagc

SEQ ID NO: 5323 - DNA, 17 bp, Homo sapiens
tacgctcactgcaagct

SEQ ID NO: 5324 - DNA, 17 bp, Homo sapiens
acgctcactgcaagctc

SEQ ID NO: 5325 - DNA, 17 bp, Homo sapiens
cgctcactgcaagctcc

SEQ ID NO: 5326 - DNA, 17 bp, Homo sapiens
gctcactgcaagctcca

SEQ ID NO: 5327 - DNA, 17 bp, Homo sapiens
ctcactgcaagctccac

SEQ ID NO: 5328 - DNA, 17 bp, Homo sapiens
tcactgcaagctccacc

SEQ ID NO: 5329 - DNA, 17 bp, Homo sapiens
cactgcaagctccacct

SEQ ID NO: 5330 - DNA, 17 bp, Homo sapiens
actgcaagctccacctc

SEQ ID NO: 5331 - DNA, 17 bp, Homo sapiens
ctgcaagctccacctcc

SEQ ID NO: 5332 - DNA, 17 bp, Homo sapiens
tgcaagctccacctcct

SEQ ID NO: 5333 - DNA, 17 bp, Homo sapiens
gcaagctccacctcctg

SEQ ID NO: 5334 - DNA, 17 bp, Homo sapiens
caagctccacctcctgg

SEQ ID NO: 5335 - DNA, 17 bp, Homo sapiens
aagctccacctcctggg

SEQ ID NO: 5336 - DNA, 17 bp, Homo sapiens
agctccacctcctgggt

SEQ ID NO: 5337 - DNA, 17 bp, Homo sapiens
gctccacctcctgggtt

SEQ ID NO: 5338 - DNA, 17 bp, Homo sapiens
ctccacctcctgggttc

SEQ ID NO: 5339 - DNA, 17 bp, Homo sapiens
tccacctcctgggttca

SEQ ID NO: 5340 - DNA, 17 bp, Homo sapiens
ccacctcctgggttcac

SEQ ID NO: 5341 - DNA, 17 bp, Homo sapiens
cacctcctgggttcaca

SEQ ID NO: 5342 - DNA, 17 bp, Homo sapiens
acctcctgggttcacac

SEQ ID NO: 5343 - DNA, 17 bp, Homo sapiens
cctcctgggttcacacc

SEQ ID NO: 5344 - DNA, 17 bp, Homo sapiens
ctcctgggttcacacca

SEQ ID NO: 5345 - DNA, 17 bp, Homo sapiens
tcctgggttcacaccat

SEQ ID NO: 5346 - DNA, 17 bp, Homo sapiens
cctgggttcacaccatt

SEQ ID NO: 5347 - DNA, 17 bp, Homo sapiens
ctgggttcacaccattc

SEQ ID NO: 5348 - DNA, 17 bp, Homo sapiens
tgggttcacaccattct

SEQ ID NO: 5349 - DNA, 17 bp, Homo sapiens
gggttcacaccattctc

SEQ ID NO: 5350 - DNA, 17 bp, Homo sapiens
ggttcacaccattctcc

SEQ ID NO: 5351 - DNA, 17 bp, Homo sapiens
gttcacaccattctcct

SEQ ID NO: 5352 - DNA, 17 bp, Homo sapiens
ttcacaccattctcctg

SEQ ID NO: 5353 - DNA, 17 bp, Homo sapiens
tcacaccattctcctgc

SEQ ID NO: 5354 - DNA, 17 bp, Homo sapiens
cacaccattctcctgct

SEQ ID NO: 5355 - DNA, 17 bp, Homo sapiens
acaccattctcctgctt

SEQ ID NO: 5356 - DNA, 17 bp, Homo sapiens
caccattctcctgcttc

SEQ ID NO: 5357 - DNA, 17 bp, Homo sapiens
accattctcctgcttca

SEQ ID NO: 5358 - DNA, 17 bp, Homo sapiens
ccattctcctgcttcag

SEQ ID NO: 5359 - DNA, 17 bp, Homo sapiens
cattctcctgcttcagt

SEQ ID NO: 5360 - DNA, 17 bp, Homo sapiens
attctcctgcttcagtc

SEQ ID NO: 5361 - DNA, 17 bp, Homo sapiens
ttctcctgcttcagtct

SEQ ID NO: 5362 - DNA, 17 bp, Homo sapiens
tctcctgcttcagtctc

SEQ ID NO: 5363 - DNA, 17 bp, Homo sapiens
ctcctgcttcagtctcc

SEQ ID NO: 5364 - DNA, 17 bp, Homo sapiens
tcctgcttcagtctccc

SEQ ID NO: 5365 - DNA, 17 bp, Homo sapiens
cctgcttcagtctcccg

SEQ ID NO: 5366 - DNA, 17 bp, Homo sapiens
ctgcttcagtctcccga

SEQ ID NO: 5367 - DNA, 17 bp, Homo sapiens
tgcttcagtctcccgag

SEQ ID NO: 5368 - DNA, 17 bp, Homo sapiens
gcttcagtctcccgagt

SEQ ID NO: 5369 - DNA, 17 bp, Homo sapiens
cttcagtctcccgagta

SEQ ID NO: 5370 - DNA, 17 bp, Homo sapiens
ttcagtctcccgagtag

SEQ ID NO: 5371 - DNA, 17 bp, Homo sapiens
tcagtctcccgagtagc

SEQ ID NO: 5372 - DNA, 17 bp, Homo sapiens
cagtctcccgagtagct

SEQ ID NO: 5373 - DNA, 17 bp, Homo sapiens
agtctcccgagtagctg

SEQ ID NO: 5374 - DNA, 17 bp, Homo sapiens
gtctcccgagtagctgg

SEQ ID NO: 5375 - DNA, 17 bp, Homo sapiens
tctcccgagtagctgga

SEQ ID NO: 5376 - DNA, 17 bp, Homo sapiens
ctcccgagtagctggaa

SEQ ID NO: 5377 - DNA, 17 bp, Homo sapiens
tcccgagtagctggaat

SEQ ID NO: 5378 - DNA, 17 bp, Homo sapiens
cccgagtagctggaatt

SEQ ID NO: 5379 - DNA, 17 bp, Homo sapiens
ccgagtagctggaatta

SEQ ID NO: 5380 - DNA, 17 bp, Homo sapiens
cgagtagctggaattac

SEQ ID NO: 5381 - DNA, 17 bp, Homo sapiens
gagtagctggaattaca

SEQ ID NO: 5382 - DNA, 17 bp, Homo sapiens
agtagctggaattacaa

SEQ ID NO: 5383 - DNA, 17 bp, Homo sapiens
gtagctggaattacaag

SEQ ID NO: 5384 - DNA, 17 bp, Homo sapiens
tagctggaattacaagc

SEQ ID NO: 5385 - DNA, 17 bp, Homo sapiens
agctggaattacaagca

SEQ ID NO: 5386 - DNA, 17 bp, Homo sapiens
gctggaattacaagcac

SEQ ID NO: 5387 - DNA, 17 bp, Homo sapiens
ctggaattacaagcacc

SEQ ID NO: 5388 - DNA, 17 bp, Homo sapiens
tggaattacaagcaccc

SEQ ID NO: 5389 - DNA, 17 bp, Homo sapiens
ggaattacaagcacccg

SEQ ID NO: 5390 - DNA, 17 bp, Homo sapiens
gaattacaagcacccgc

SEQ ID NO: 5391 - DNA, 17 bp, Homo sapiens
aattacaagcacccgcc

SEQ ID NO: 5392 - DNA, 17 bp, Homo sapiens
attacaagcacccgcca

SEQ ID NO: 5393 - DNA, 17 bp, Homo sapiens
ttacaagcacccgccac

SEQ ID NO: 5394 - DNA, 17 bp, Homo sapiens
tacaagcacccgccacc

SEQ ID NO: 5395 - DNA, 17 bp, Homo sapiens
acaagcacccgccacca

SEQ ID NO: 5396 - DNA, 17 bp, Homo sapiens
caagcacccgccaccac

SEQ ID NO: 5397 - DNA, 17 bp, Homo sapiens
aagcacccgccaccacg

SEQ ID NO: 5398 - DNA, 17 bp, Homo sapiens
agcacccgccaccacgc

SEQ ID NO: 5399 - DNA, 17 bp, Homo sapiens
gcacccgccaccacgcc

SEQ ID NO: 5400 - DNA, 17 bp, Homo sapiens
cacccgccaccacgccc

SEQ ID NO: 5401 - DNA, 17 bp, Homo sapiens
acccgccaccacgccca

SEQ ID NO: 5402 - DNA, 17 bp, Homo sapiens
cccgccaccacgcccaa

SEQ ID NO: 5403 - DNA, 17 bp, Homo sapiens
ccgccaccacgcccaac

SEQ ID NO: 5404 - DNA, 17 bp, Homo sapiens
cgccaccacgcccaact

SEQ ID NO: 5405 - DNA, 17 bp, Homo sapiens
gccaccacgcccaacta

SEQ ID NO: 5406 - DNA, 17 bp, Homo sapiens
ccaccacgcccaactaa

SEQ ID NO: 5407 - DNA, 17 bp, Homo sapiens
caccacgcccaactaat

SEQ ID NO: 5408 - DNA, 17 bp, Homo sapiens
accacgcccaactaata

SEQ ID NO: 5409 - DNA, 17 bp, Homo sapiens
ccacgcccaactaatat

SEQ ID NO: 5410 - DNA, 17 bp, Homo sapiens
cacgcccaactaatatt

SEQ ID NO: 5411 - DNA, 17 bp, Homo sapiens
acgcccaactaatattt

SEQ ID NO: 5412 - DNA, 17 bp, Homo sapiens
cgcccaactaatatttt

SEQ ID NO: 5413 - DNA, 17 bp, Homo sapiens
gcccaactaatattttg

SEQ ID NO: 5414 - DNA, 17 bp, Homo sapiens
cccaactaatattttgt

SEQ ID NO: 5415 - DNA, 17 bp, Homo sapiens
ccaactaatattttgta

SEQ ID NO: 5416 - DNA, 17 bp, Homo sapiens
caactaatattttgtat

SEQ ID NO: 5417 - DNA, 17 bp, Homo sapiens
aactaatattttgtatt

SEQ ID NO: 5418 - DNA, 17 bp, Homo sapiens
actaatattttgtattt

SEQ ID NO: 5419 - DNA, 17 bp, Homo sapiens
ctaatattttgtatttt

SEQ ID NO: 5420 - DNA, 17 bp, Homo sapiens
taatattttgtattttt

SEQ ID NO: 5421 - DNA, 17 bp, Homo sapiens
aatattttgtattttta

SEQ ID NO: 5422 - DNA, 17 bp, Homo sapiens
atattttgtatttttag

SEQ ID NO: 5423 - DNA, 17 bp, Homo sapiens
tattttgtatttttagt

SEQ ID NO: 5424 - DNA, 17 bp, Homo sapiens
attttgtatttttagta

SEQ ID NO: 5425 - DNA, 17 bp, Homo sapiens
ttttgtatttttagtag

SEQ ID NO: 5426 - DNA, 17 bp, Homo sapiens
tttgtatttttagtaga

SEQ ID NO: 5427 - DNA, 17 bp, Homo sapiens
ttgtatttttagtagag

SEQ ID NO: 5428 - DNA, 17 bp, Homo sapiens
tgtatttttagtagaga

SEQ ID NO: 5429 - DNA, 17 bp, Homo sapiens
gtatttttagtagagac

SEQ ID NO: 5430 - DNA, 17 bp, Homo sapiens
tatttttagtagagacg

SEQ ID NO: 5431 - DNA, 17 bp, Homo sapiens
atttttagtagagacgg

SEQ ID NO: 5432 - DNA, 17 bp, Homo sapiens
tttttagtagagacggg

SEQ ID NO: 5433 - DNA, 17 bp, Homo sapiens
ttttagtagagacgggg

SEQ ID NO: 5434 - DNA, 17 bp, Homo sapiens
tttagtagagacggggg

SEQ ID NO: 5435 - DNA, 17 bp, Homo sapiens
ttagtagagacgggggt

SEQ ID NO: 5436 - DNA, 17 bp, Homo sapiens
tagtagagacgggggtt

SEQ ID NO: 5437 - DNA, 17 bp, Homo sapiens
agtagagacgggggttt

SEQ ID NO: 5438 - DNA, 17 bp, Homo sapiens
gtagagacgggggtttc

SEQ ID NO: 5439 - DNA, 17 bp, Homo sapiens
tagagacgggggtttca

SEQ ID NO: 5440 - DNA, 17 bp, Homo sapiens
agagacgggggtttcac

SEQ ID NO: 5441 - DNA, 17 bp, Homo sapiens
gagacgggggtttcacc

SEQ ID NO: 5442 - DNA, 17 bp, Homo sapiens
agacgggggtttcaccg

SEQ ID NO: 5443 - DNA, 17 bp, Homo sapiens
gacgggggtttcaccgt

SEQ ID NO: 5444 - DNA, 17 bp, Homo sapiens
acgggggtttcaccgtg

SEQ ID NO: 5445 - DNA, 17 bp, Homo sapiens
cgggggtttcaccgtgt

SEQ ID NO: 5446 - DNA, 17 bp, Homo sapiens
gggggtttcaccgtgtt

SEQ ID NO: 5447 - DNA, 17 bp, Homo sapiens
ggggtttcaccgtgtta

SEQ ID NO: 5448 - DNA, 17 bp, Homo sapiens
gggtttcaccgtgttag

SEQ ID NO: 5449 - DNA, 17 bp, Homo sapiens
ggtttcaccgtgttagc

SEQ ID NO: 5450 - DNA, 17 bp, Homo sapiens
gtttcaccgtgttagcc

SEQ ID NO: 5451 - DNA, 17 bp, Homo sapiens
tttcaccgtgttagcca

SEQ ID NO: 5452 - DNA, 17 bp, Homo sapiens
ttcaccgtgttagccag

SEQ ID NO: 5453 - DNA, 17 bp, Homo sapiens
tcaccgtgttagccagg

SEQ ID NO: 5454 - DNA, 17 bp, Homo sapiens
caccgtgttagccagga

SEQ ID NO: 5455 - DNA, 17 bp, Homo sapiens
accgtgttagccaggat

SEQ ID NO: 5456 - DNA, 17 bp, Homo sapiens
ccgtgttagccaggatg

SEQ ID NO: 5457 - DNA, 17 bp, Homo sapiens
cgtgttagccaggatgg

SEQ ID NO: 5458 - DNA, 17 bp, Homo sapiens
gtgttagccaggatggt

SEQ ID NO: 5459 - DNA, 17 bp, Homo sapiens
tgttagccaggatggtc

SEQ ID NO: 5460 - DNA, 17 bp, Homo sapiens
gttagccaggatggtct

SEQ ID NO: 5461 - DNA, 17 bp, Homo sapiens
ttagccaggatggtctc

SEQ ID NO: 5462 - DNA, 17 bp, Homo sapiens
tagccaggatggtctcg

SEQ ID NO: 5463 - DNA, 17 bp, Homo sapiens
agccaggatggtctcga

SEQ ID NO: 5464 - DNA, 17 bp, Homo sapiens
gccaggatggtctcgat

SEQ ID NO: 5465 - DNA, 17 bp, Homo sapiens
ccaggatggtctcgatc

SEQ ID NO: 5466 - DNA, 17 bp, Homo sapiens
caggatggtctcgatct

SEQ ID NO: 5467 - DNA, 17 bp, Homo sapiens
aggatggtctcgatctc

SEQ ID NO: 5468 - DNA, 17 bp, Homo sapiens
ggatggtctcgatctcc

SEQ ID NO: 5469 - DNA, 17 bp, Homo sapiens
gatggtctcgatctcct

SEQ ID NO: 5470 - DNA, 17 bp, Homo sapiens
atggtctcgatctcctg

SEQ ID NO: 5471 - DNA, 17 bp, Homo sapiens
tggtctcgatctcctga

SEQ ID NO: 5472 - DNA, 17 bp, Homo sapiens
ggtctcgatctcctgac

SEQ ID NO: 5473 - DNA, 17 bp, Homo sapiens
gtctcgatctcctgact

SEQ ID NO: 5474 - DNA, 17 bp, Homo sapiens
tctcgatctcctgactt

SEQ ID NO: 5475 - DNA, 25 bp, Homo sapiens
atatttgcatgttccctggattttg

SEQ ID NO: 5476 - DNA, 25 bp, Homo sapiens
tatttgcatgttccctggattttgt

SEQ ID NO: 5477 - DNA, 25 bp, Homo sapiens
atttgcatgttccctggattttgta

SEQ ID NO: 5478 - DNA, 25 bp, Homo sapiens
tttgcatgttccctggattttgtat

SEQ ID NO: 5479 - DNA, 25 bp, Homo sapiens
ttgcatgttccctggattttgtatt

SEQ ID NO: 5480 - DNA, 25 bp, Homo sapiens
tgcatgttccctggattttgtattt

SEQ ID NO: 5481 - DNA, 25 bp, Homo sapiens
gcatgttccctggattttgtatttt

SEQ ID NO: 5482 - DNA, 25 bp, Homo sapiens
catgttccctggattttgtattttt

SEQ ID NO: 5483 - DNA, 25 bp, Homo sapiens
atgttccctggattttgtatttttt

SEQ ID NO: 5484 - DNA, 25 bp, Homo sapiens
tgttccctggattttgtattttttg

SEQ ID NO: 5485 - DNA, 25 bp, Homo sapiens
gttccctggattttgtattttttga

SEQ ID NO: 5486 - DNA, 25 bp, Homo sapiens
ttccctggattttgtattttttgat

SEQ ID NO: 5487 - DNA, 25 bp, Homo sapiens
tccctggattttgtattttttgata

SEQ ID NO: 5488 - DNA, 25 bp, Homo sapiens
ccctggattttgtattttttgataa

SEQ ID NO: 5489 - DNA, 25 bp, Homo sapiens
cctggattttgtattttttgataaa

SEQ ID NO: 5490 - DNA, 25 bp, Homo sapiens
ctggattttgtattttttgataaag

SEQ ID NO: 5491 - DNA, 25 bp, Homo sapiens
tggattttgtattttttgataaaga

SEQ ID NO: 5492 - DNA, 25 bp, Homo sapiens
ggattttgtattttttgataaagat

SEQ ID NO: 5493 - DNA, 25 bp, Homo sapiens
gattttgtattttttgataaagata

SEQ ID NO: 5494 - DNA, 25 bp, Homo sapiens
attttgtattttttgataaagatat

SEQ ID NO: 5495 - DNA, 25 bp, Homo sapiens
ttttgtattttttgataaagatata

SEQ ID NO: 5496 - DNA, 25 bp, Homo sapiens
tttgtattttttgataaagatatat

SEQ ID NO: 5497 - DNA, 25 bp, Homo sapiens
ttgtattttttgataaagatatatt

SEQ ID NO: 5498 - DNA, 25 bp, Homo sapiens
tgtattttttgataaagatatattc

SEQ ID NO: 5499 - DNA, 25 bp, Homo sapiens
gtattttttgataaagatatattct

SEQ ID NO: 5500 - DNA, 25 bp, Homo sapiens
tattttttgataaagatatattctt

SEQ ID NO: 5501 - DNA, 25 bp, Homo sapiens
attttttgataaagatatattcttg

SEQ ID NO: 5502 - DNA, 25 bp, Homo sapiens
ttttttgataaagatatattcttgg

SEQ ID NO: 5503 - DNA, 25 bp, Homo sapiens
tttttgataaagatatattcttggg

SEQ ID NO: 5504 - DNA, 25 bp, Homo sapiens
ttttgataaagatatattcttgggc

SEQ ID NO: 5505 - DNA, 25 bp, Homo sapiens
tttgataaagatatattcttgggcc

SEQ ID NO: 5506 - DNA, 25 bp, Homo sapiens
ttgataaagatatattcttgggcca

SEQ ID NO: 5507 - DNA, 25 bp, Homo sapiens
tgataaagatatattcttgggccac

SEQ ID NO: 5508 - DNA, 25 bp, Homo sapiens
gataaagatatattcttgggccaca

SEQ ID NO: 5509 - DNA, 25 bp, Homo sapiens
ataaagatatattcttgggccacag

SEQ ID NO: 5510 - DNA, 25 bp, Homo sapiens
taaagatatattcttgggccacagt

SEQ ID NO: 5511 - DNA, 25 bp, Homo sapiens
aaagatatattcttgggccacagta

SEQ ID NO: 5512 - DNA, 25 bp, Homo sapiens
aagatatattcttgggccacagtag

SEQ ID NO: 5513 - DNA, 25 bp, Homo sapiens
agatatattcttgggccacagtagc

SEQ ID NO: 5514 - DNA, 25 bp, Homo sapiens
gatatattcttgggccacagtagct

SEQ ID NO: 5515 - DNA, 25 bp, Homo sapiens
atatattcttgggccacagtagctg

SEQ ID NO: 5516 - DNA, 25 bp, Homo sapiens
tatattcttgggccacagtagctgg

SEQ ID NO: 5517 - DNA, 25 bp, Homo sapiens
atattcttgggccacagtagctgga

SEQ ID NO: 5518 - DNA, 25 bp, Homo sapiens
tattcttgggccacagtagctggag

SEQ ID NO: 5519 - DNA, 25 bp, Homo sapiens
attcttgggccacagtagctggaga

SEQ ID NO: 5520 - DNA, 25 bp, Homo sapiens
ttcttgggccacagtagctggagat

SEQ ID NO: 5521 - DNA, 25 bp, Homo sapiens
tcttgggccacagtagctggagata

SEQ ID NO: 5522 - DNA, 25 bp, Homo sapiens
cttgggccacagtagctggagatat

SEQ ID NO: 5523 - DNA, 25 bp, Homo sapiens
ttgggccacagtagctggagatata

SEQ ID NO: 5524 - DNA, 25 bp, Homo sapiens
tgggccacagtagctggagatataa

SEQ ID NO: 5525 - DNA, 25 bp, Homo sapiens
gggccacagtagctggagatataat

SEQ ID NO: 5526 - DNA, 25 bp, Homo sapiens
ggccacagtagctggagatataatg

SEQ ID NO: 5527 - DNA, 25 bp, Homo sapiens
gccacagtagctggagatataatgc

SEQ ID NO: 5528 - DNA, 25 bp, Homo sapiens
ccacagtagctggagatataatgcc

SEQ ID NO: 5529 - DNA, 25 bp, Homo sapiens
cacagtagctggagatataatgccg

SEQ ID NO: 5530 - DNA, 25 bp, Homo sapiens
acagtagctggagatataatgccgg

SEQ ID NO: 5531 - DNA, 25 bp, Homo sapiens
cagtagctggagatataatgccgga

SEQ ID NO: 5532 - DNA, 25 bp, Homo sapiens
agtagctggagatataatgccggag

SEQ ID NO: 5533 - DNA, 25 bp, Homo sapiens
gtagctggagatataatgccggagg

SEQ ID NO: 5534 - DNA, 25 bp, Homo sapiens
tagctggagatataatgccggagga

SEQ ID NO: 5535 - DNA, 25 bp, Homo sapiens
agctggagatataatgccggaggat

SEQ ID NO: 5536 - DNA, 25 bp, Homo sapiens
gctggagatataatgccggaggatt

SEQ ID NO: 5537 - DNA, 25 bp, Homo sapiens
ctggagatataatgccggaggattc

SEQ ID NO: 5538 - DNA, 25 bp, Homo sapiens
tggagatataatgccggaggattct

SEQ ID NO: 5539 - DNA, 25 bp, Homo sapiens
ggagatataatgccggaggattctt

SEQ ID NO: 5540 - DNA, 25 bp, Homo sapiens
gagatataatgccggaggattcttt

SEQ ID NO: 5541 - DNA, 25 bp, Homo sapiens
agatataatgccggaggattctttt

SEQ ID NO: 5542 - DNA, 25 bp, Homo sapiens
gatataatgccggaggattcttttt

SEQ ID NO: 5543 - DNA, 25 bp, Homo sapiens
atataatgccggaggattctttttt

SEQ ID NO: 5544 - DNA, 25 bp, Homo sapiens
tataatgccggaggattcttttttt

SEQ ID NO: 5545 - DNA, 25 bp, Homo sapiens
ataatgccggaggattctttttttt

SEQ ID NO: 5546 - DNA, 25 bp, Homo sapiens
taatgccggaggattcttttttttt

SEQ ID NO: 5547 - DNA, 25 bp, Homo sapiens
aatgccggaggattctttttttttt

SEQ ID NO: 5548 - DNA, 25 bp, Homo sapiens
atgccggaggattcttttttttttt

SEQ ID NO: 5549 - DNA, 25 bp, Homo sapiens
tgccggaggattctttttttttttt

SEQ ID NO: 5550 - DNA, 25 bp, Homo sapiens
gccggaggattcttttttttttttt

SEQ ID NO: 5551 - DNA, 25 bp, Homo sapiens
ccggaggattctttttttttttttt

SEQ ID NO: 5552 - DNA, 25 bp, Homo sapiens
cggaggattcttttttttttttttt

SEQ ID NO: 5553 - DNA, 25 bp, Homo sapiens
ggaggattctttttttttttttttt

SEQ ID NO: 5554 - DNA, 25 bp, Homo sapiens
gaggattcttttttttttttttttg

SEQ ID NO: 5555 - DNA, 25 bp, Homo sapiens
aggattcttttttttttttttttga

SEQ ID NO: 5556 - DNA, 25 bp, Homo sapiens
ggattcttttttttttttttttgag

SEQ ID NO: 5557 - DNA, 25 bp, Homo sapiens
gattcttttttttttttttttgaga

SEQ ID NO: 5558 - DNA, 25 bp, Homo sapiens
attcttttttttttttttttgagac

SEQ ID NO: 5559 - DNA, 25 bp, Homo sapiens
ttcttttttttttttttttgagaca

SEQ ID NO: 5560 - DNA, 25 bp, Homo sapiens
tcttttttttttttttttgagacag

SEQ ID NO: 5561 - DNA, 25 bp, Homo sapiens
cttttttttttttttttgagacaga

SEQ ID NO: 5562 - DNA, 25 bp, Homo sapiens
ttttttttttttttttgagacagag

SEQ ID NO: 5563 - DNA, 25 bp, Homo sapiens
tttttttttttttttgagacagagt

SEQ ID NO: 5564 - DNA, 25 bp, Homo sapiens
ttttttttttttttgagacagagtc

SEQ ID NO: 5565 - DNA, 25 bp, Homo sapiens
tttttttttttttgagacagagtct

SEQ ID NO: 5566 - DNA, 25 bp, Homo sapiens
ttttttttttttgagacagagtctg

SEQ ID NO: 5567 - DNA, 25 bp, Homo sapiens
tttttttttttgagacagagtctgt

SEQ ID NO: 5568 - DNA, 25 bp, Homo sapiens
ttttttttttgagacagagtctgtc

SEQ ID NO: 5569 - DNA, 25 bp, Homo sapiens
tttttttttgagacagagtctgtct

SEQ ID NO: 5570 - DNA, 25 bp, Homo sapiens
ttttttttgagacagagtctgtctc

SEQ ID NO: 5571 - DNA, 25 bp, Homo sapiens
tttttttgagacagagtctgtctct

SEQ ID NO: 5572 - DNA, 25 bp, Homo sapiens
ttttttgagacagagtctgtctcta

SEQ ID NO: 5573 - DNA, 25 bp, Homo sapiens
tttttgagacagagtctgtctctat

SEQ ID NO: 5574 - DNA, 25 bp, Homo sapiens
ttttgagacagagtctgtctctatt

SEQ ID NO: 5575 - DNA, 25 bp, Homo sapiens
tttgagacagagtctgtctctattg

SEQ ID NO: 5576 - DNA, 25 bp, Homo sapiens
ttgagacagagtctgtctctattgc

SEQ ID NO: 5577 - DNA, 25 bp, Homo sapiens
tgagacagagtctgtctctattgcc

SEQ ID NO: 5578 - DNA, 25 bp, Homo sapiens
gagacagagtctgtctctattgcct

SEQ ID NO: 5579 - DNA, 25 bp, Homo sapiens
agacagagtctgtctctattgcctg

SEQ ID NO: 5580 - DNA, 25 bp, Homo sapiens
gacagagtctgtctctattgcctgg

SEQ ID NO: 5581 - DNA, 25 bp, Homo sapiens
acagagtctgtctctattgcctggg

SEQ ID NO: 5582 - DNA, 25 bp, Homo sapiens
cagagtctgtctctattgcctgggc

SEQ ID NO: 5583 - DNA, 25 bp, Homo sapiens
agagtctgtctctattgcctgggct

SEQ ID NO: 5584 - DNA, 25 bp, Homo sapiens
gagtctgtctctattgcctgggctg

SEQ ID NO: 5585 - DNA, 25 bp, Homo sapiens
agtctgtctctattgcctgggctgg

SEQ ID NO: 5586 - DNA, 25 bp, Homo sapiens
gtctgtctctattgcctgggctgga

SEQ ID NO: 5587 - DNA, 25 bp, Homo sapiens
tctgtctctattgcctgggctggag

SEQ ID NO: 5588 - DNA, 25 bp, Homo sapiens
ctgtctctattgcctgggctggagt

SEQ ID NO: 5589 - DNA, 25 bp, Homo sapiens
tgtctctattgcctgggctggagtg

SEQ ID NO: 5590 - DNA, 25 bp, Homo sapiens
gtctctattgcctgggctggagtgc

SEQ ID NO: 5591 - DNA, 25 bp, Homo sapiens
tctctattgcctgggctggagtgca

SEQ ID NO: 5592 - DNA, 25 bp, Homo sapiens
ctctattgcctgggctggagtgcag

SEQ ID NO: 5593 - DNA, 25 bp, Homo sapiens
tctattgcctgggctggagtgcagt

SEQ ID NO: 5594 - DNA, 25 bp, Homo sapiens
ctattgcctgggctggagtgcagtg

SEQ ID NO: 5595 - DNA, 25 bp, Homo sapiens
tattgcctgggctggagtgcagtgg

SEQ ID NO: 5596 - DNA, 25 bp, Homo sapiens
attgcctgggctggagtgcagtggc

SEQ ID NO: 5597 - DNA, 25 bp, Homo sapiens
ttgcctgggctggagtgcagtggcc

SEQ ID NO: 5598 - DNA, 25 bp, Homo sapiens
tgcctgggctggagtgcagtggccc

SEQ ID NO: 5599 - DNA, 25 bp, Homo sapiens
gcctgggctggagtgcagtggccca

SEQ ID NO: 5600 - DNA, 25 bp, Homo sapiens
cctgggctggagtgcagtggcccaa

SEQ ID NO: 5601 - DNA, 25 bp, Homo sapiens
ctgggctggagtgcagtggcccaag

SEQ ID NO: 5602 - DNA, 25 bp, Homo sapiens
tgggctggagtgcagtggcccaagc

SEQ ID NO: 5603 - DNA, 25 bp, Homo sapiens
gggctggagtgcagtggcccaagct

SEQ ID NO: 5604 - DNA, 25 bp, Homo sapiens
ggctggagtgcagtggcccaagcta

SEQ ID NO: 5605 - DNA, 25 bp, Homo sapiens
gctggagtgcagtggcccaagctac

SEQ ID NO: 5606 - DNA, 25 bp, Homo sapiens
ctggagtgcagtggcccaagctacg

SEQ ID NO: 5607 - DNA, 25 bp, Homo sapiens
tggagtgcagtggcccaagctacgc

SEQ ID NO: 5608 - DNA, 25 bp, Homo sapiens
ggagtgcagtggcccaagctacgct

SEQ ID NO: 5609 - DNA, 25 bp, Homo sapiens
gagtgcagtggcccaagctacgctc

SEQ ID NO: 5610 - DNA, 25 bp, Homo sapiens
agtgcagtggcccaagctacgctca

SEQ ID NO: 5611 - DNA, 25 bp, Homo sapiens
gtgcagtggcccaagctacgctcac

SEQ ID NO: 5612 - DNA, 25 bp, Homo sapiens
tgcagtggcccaagctacgctcact

SEQ ID NO: 5613 - DNA, 25 bp, Homo sapiens
gcagtggcccaagctacgctcactg

SEQ ID NO: 5614 - DNA, 25 bp, Homo sapiens
cagtggcccaagctacgctcactgc

SEQ ID NO: 5615 - DNA, 25 bp, Homo sapiens
agtggcccaagctacgctcactgca

SEQ ID NO: 5616 - DNA, 25 bp, Homo sapiens
gtggcccaagctacgctcactgcaa

SEQ ID NO: 5617 - DNA, 25 bp, Homo sapiens
tggcccaagctacgctcactgcaag

SEQ ID NO: 5618 - DNA, 25 bp, Homo sapiens
ggcccaagctacgctcactgcaagc

SEQ ID NO: 5619 - DNA, 25 bp, Homo sapiens
gcccaagctacgctcactgcaagct

SEQ ID NO: 5620 - DNA, 25 bp, Homo sapiens
cccaagctacgctcactgcaagctc

SEQ ID NO: 5621 - DNA, 25 bp, Homo sapiens
ccaagctacgctcactgcaagctcc

SEQ ID NO: 5622 - DNA, 25 bp, Homo sapiens
caagctacgctcactgcaagctcca

SEQ ID NO: 5623 - DNA, 25 bp, Homo sapiens
aagctacgctcactgcaagctccac

SEQ ID NO: 5624 - DNA, 25 bp, Homo sapiens
agctacgctcactgcaagctccacc

SEQ ID NO: 5625 - DNA, 25 bp, Homo sapiens
gctacgctcactgcaagctccacct

SEQ ID NO: 5626 - DNA, 25 bp, Homo sapiens
ctacgctcactgcaagctccacctc

SEQ ID NO: 5627 - DNA, 25 bp, Homo sapiens
tacgctcactgcaagctccacctcc

SEQ ID NO: 5628 - DNA, 25 bp, Homo sapiens
acgctcactgcaagctccacctcct

SEQ ID NO: 5629 - DNA, 25 bp, Homo sapiens
cgctcactgcaagctccacctcctg

SEQ ID NO: 5630 - DNA, 25 bp, Homo sapiens
gctcactgcaagctccacctcctgg

SEQ ID NO: 5631 - DNA, 25 bp, Homo sapiens
ctcactgcaagctccacctcctggg

SEQ ID NO: 5632 - DNA, 25 bp, Homo sapiens
tcactgcaagctccacctcctgggt

SEQ ID NO: 5633 - DNA, 25 bp, Homo sapiens
cactgcaagctccacctcctgggtt

SEQ ID NO: 5634 - DNA, 25 bp, Homo sapiens
actgcaagctccacctcctgggttc

SEQ ID NO: 5635 - DNA, 25 bp, Homo sapiens
ctgcaagctccacctcctgggttca

SEQ ID NO: 5636 - DNA, 25 bp, Homo sapiens
tgcaagctccacctcctgggttcac

SEQ ID NO: 5637 - DNA, 25 bp, Homo sapiens
gcaagctccacctcctgggttcaca

SEQ ID NO: 5638 - DNA, 25 bp, Homo sapiens
caagctccacctcctgggttcacac

SEQ ID NO: 5639 - DNA, 25 bp, Homo sapiens
aagctccacctcctgggttcacacc

SEQ ID NO: 5640 - DNA, 25 bp, Homo sapiens
agctccacctcctgggttcacacca

SEQ ID NO: 5641 - DNA, 25 bp, Homo sapiens
gctccacctcctgggttcacaccat

SEQ ID NO: 5642 - DNA, 25 bp, Homo sapiens
ctccacctcctgggttcacaccatt

SEQ ID NO: 5643 - DNA, 25 bp, Homo sapiens
tccacctcctgggttcacaccattc

SEQ ID NO: 5644 - DNA, 25 bp, Homo sapiens
ccacctcctgggttcacaccattct

SEQ ID NO: 5645 - DNA, 25 bp, Homo sapiens
cacctcctgggttcacaccattctc

SEQ ID NO: 5646 - DNA, 25 bp, Homo sapiens
acctcctgggttcacaccattctcc

SEQ ID NO: 5647 - DNA, 25 bp, Homo sapiens
cctcctgggttcacaccattctcct

SEQ ID NO: 5648 - DNA, 25 bp, Homo sapiens
ctcctgggttcacaccattctcctg

SEQ ID NO: 5649 - DNA, 25 bp, Homo sapiens
tcctgggttcacaccattctcctgc

SEQ ID NO: 5650 - DNA, 25 bp, Homo sapiens
cctgggttcacaccattctcctgct

SEQ ID NO: 5651 - DNA, 25 bp, Homo sapiens
ctgggttcacaccattctcctgctt

SEQ ID NO: 5652 - DNA, 25 bp, Homo sapiens
tgggttcacaccattctcctgcttc

SEQ ID NO: 5653 - DNA, 25 bp, Homo sapiens
gggttcacaccattctcctgcttca

SEQ ID NO: 5654 - DNA, 25 bp, Homo sapiens
ggttcacaccattctcctgcttcag

SEQ ID NO: 5655 - DNA, 25 bp, Homo sapiens
gttcacaccattctcctgcttcagt

SEQ ID NO: 5656 - DNA, 25 bp, Homo sapiens
ttcacaccattctcctgcttcagtc

SEQ ID NO: 5657 - DNA, 25 bp, Homo sapiens
tcacaccattctcctgcttcagtct

SEQ ID NO: 5658 - DNA, 25 bp, Homo sapiens
cacaccattctcctgcttcagtctc

SEQ ID NO: 5659 - DNA, 25 bp, Homo sapiens
acaccattctcctgcttcagtctcc

SEQ ID NO: 5660 - DNA, 25 bp, Homo sapiens
caccattctcctgcttcagtctccc

SEQ ID NO: 5661 - DNA, 25 bp, Homo sapiens
accattctcctgcttcagtctcccg

SEQ ID NO: 5662 - DNA, 25 bp, Homo sapiens
ccattctcctgcttcagtctcccga

SEQ ID NO: 5663 - DNA, 25 bp, Homo sapiens
cattctcctgcttcagtctcccgag

SEQ ID NO: 5664 - DNA, 25 bp, Homo sapiens
attctcctgcttcagtctcccgagt

SEQ ID NO: 5665 - DNA, 25 bp, Homo sapiens
ttctcctgcttcagtctcccgagta

SEQ ID NO: 5666 - DNA, 25 bp, Homo sapiens
tctcctgcttcagtctcccgagtag

SEQ ID NO: 5667 - DNA, 25 bp, Homo sapiens
ctcctgcttcagtctcccgagtagc

SEQ ID NO: 5668 - DNA, 25 bp, Homo sapiens
tcctgcttcagtctcccgagtagct

SEQ ID NO: 5669 - DNA, 25 bp, Homo sapiens
cctgcttcagtctcccgagtagctg

SEQ ID NO: 5670 - DNA, 25 bp, Homo sapiens
ctgcttcagtctcccgagtagctgg

SEQ ID NO: 5671 - DNA, 25 bp, Homo sapiens
tgcttcagtctcccgagtagctgga

SEQ ID NO: 5672 - DNA, 25 bp, Homo sapiens
gcttcagtctcccgagtagctggaa

SEQ ID NO: 5673 - DNA, 25 bp, Homo sapiens
cttcagtctcccgagtagctggaat

SEQ ID NO: 5674 - DNA, 25 bp, Homo sapiens
ttcagtctcccgagtagctggaatt

SEQ ID NO: 5675 - DNA, 25 bp, Homo sapiens
tcagtctcccgagtagctggaatta

SEQ ID NO: 5676 - DNA, 25 bp, Homo sapiens
cagtctcccgagtagctggaattac

SEQ ID NO: 5677 - DNA, 25 bp, Homo sapiens
agtctcccgagtagctggaattaca

SEQ ID NO: 5678 - DNA, 25 bp, Homo sapiens
gtctcccgagtagctggaattacaa

SEQ ID NO: 5679 - DNA, 25 bp, Homo sapiens
tctcccgagtagctggaattacaag

SEQ ID NO: 5680 - DNA, 25 bp, Homo sapiens
ctcccgagtagctggaattacaagc

SEQ ID NO: 5681 - DNA, 25 bp, Homo sapiens
tcccgagtagctggaattacaagca

SEQ ID NO: 5682 - DNA, 25 bp, Homo sapiens
cccgagtagctggaattacaagcac

SEQ ID NO: 5683 - DNA, 25 bp, Homo sapiens
ccgagtagctggaattacaagcacc

SEQ ID NO: 5684 - DNA, 25 bp, Homo sapiens
cgagtagctggaattacaagcaccc

SEQ ID NO: 5685 - DNA, 25 bp, Homo sapiens
gagtagctggaattacaagcacccg

SEQ ID NO: 5686 - DNA, 25 bp, Homo sapiens
agtagctggaattacaagcacccgc

SEQ ID NO: 5687 - DNA, 25 bp, Homo sapiens
gtagctggaattacaagcacccgcc

SEQ ID NO: 5688 - DNA, 25 bp, Homo sapiens
tagctggaattacaagcacccgcca

SEQ ID NO: 5689 - DNA, 25 bp, Homo sapiens
agctggaattacaagcacccgccac

SEQ ID NO: 5690 - DNA, 25 bp, Homo sapiens
gctggaattacaagcacccgccacc

SEQ ID NO: 5691 - DNA, 25 bp, Homo sapiens
ctggaattacaagcacccgccacca

SEQ ID NO: 5692 - DNA, 25 bp, Homo sapiens
tggaattacaagcacccgccaccac

SEQ ID NO: 5693 - DNA, 25 bp, Homo sapiens
ggaattacaagcacccgccaccacg

SEQ ID NO: 5694 - DNA, 25 bp, Homo sapiens
gaattacaagcacccgccaccacgc

SEQ ID NO: 5695 - DNA, 25 bp, Homo sapiens
aattacaagcacccgccaccacgcc

SEQ ID NO: 5696 - DNA, 25 bp, Homo sapiens
attacaagcacccgccaccacgccc

SEQ ID NO: 5697 - DNA, 25 bp, Homo sapiens
ttacaagcacccgccaccacgccca

SEQ ID NO: 5698 - DNA, 25 bp, Homo sapiens
tacaagcacccgccaccacgcccaa

SEQ ID NO: 5699 - DNA, 25 bp, Homo sapiens
acaagcacccgccaccacgcccaac

SEQ ID NO: 5700 - DNA, 25 bp, Homo sapiens
caagcacccgccaccacgcccaact

SEQ ID NO: 5701 - DNA, 25 bp, Homo sapiens
aagcacccgccaccacgcccaacta

SEQ ID NO: 5702 - DNA, 25 bp, Homo sapiens
agcacccgccaccacgcccaactaa

SEQ ID NO: 5703 - DNA, 25 bp, Homo sapiens
gcacccgccaccacgcccaactaat

SEQ ID NO: 5704 - DNA, 25 bp, Homo sapiens
cacccgccaccacgcccaactaata

SEQ ID NO: 5705 - DNA, 25 bp, Homo sapiens
acccgccaccacgcccaactaatat

SEQ ID NO: 5706 - DNA, 25 bp, Homo sapiens
cccgccaccacgcccaactaatatt

SEQ ID NO: 5707 - DNA, 25 bp, Homo sapiens
ccgccaccacgcccaactaatattt

SEQ ID NO: 5708 - DNA, 25 bp, Homo sapiens
cgccaccacgcccaactaatatttt

SEQ ID NO: 5709 - DNA, 25 bp, Homo sapiens
gccaccacgcccaactaatattttg

SEQ ID NO: 5710 - DNA, 25 bp, Homo sapiens
ccaccacgcccaactaatattttgt

SEQ ID NO: 5711 - DNA, 25 bp, Homo sapiens
caccacgcccaactaatattttgta

SEQ ID NO: 5712 - DNA, 25 bp, Homo sapiens
accacgcccaactaatattttgtat

SEQ ID NO: 5713 - DNA, 25 bp, Homo sapiens
ccacgcccaactaatattttgtatt

SEQ ID NO: 5714 - DNA, 25 bp, Homo sapiens
cacgcccaactaatattttgtattt

SEQ ID NO: 5715 - DNA, 25 bp, Homo sapiens
acgcccaactaatattttgtatttt

SEQ ID NO: 5716 - DNA, 25 bp, Homo sapiens
cgcccaactaatattttgtattttt

SEQ ID NO: 5717 - DNA, 25 bp, Homo sapiens
gcccaactaatattttgtattttta

SEQ ID NO: 5718 - DNA, 25 bp, Homo sapiens
cccaactaatattttgtatttttag

SEQ ID NO: 5719 - DNA, 25 bp, Homo sapiens
ccaactaatattttgtatttttagt

SEQ ID NO: 5720 - DNA, 25 bp, Homo sapiens
caactaatattttgtatttttagta

SEQ ID NO: 5721 - DNA, 25 bp, Homo sapiens
aactaatattttgtatttttagtag

SEQ ID NO: 5722 - DNA, 25 bp, Homo sapiens
actaatattttgtatttttagtaga

SEQ ID NO: 5723 - DNA, 25 bp, Homo sapiens
ctaatattttgtatttttagtagag

SEQ ID NO: 5724 - DNA, 25 bp, Homo sapiens
taatattttgtatttttagtagaga

SEQ ID NO: 5725 - DNA, 25 bp, Homo sapiens
aatattttgtatttttagtagagac

SEQ ID NO: 5726 - DNA, 25 bp, Homo sapiens
atattttgtatttttagtagagacg

SEQ ID NO: 5727 - DNA, 25 bp, Homo sapiens
tattttgtatttttagtagagacgg

SEQ ID NO: 5728 - DNA, 25 bp, Homo sapiens
attttgtatttttagtagagacggg

SEQ ID NO: 5729 - DNA, 25 bp, Homo sapiens
ttttgtatttttagtagagacgggg

SEQ ID NO: 5730 - DNA, 25 bp, Homo sapiens
tttgtatttttagtagagacggggg

SEQ ID NO: 5731 - DNA, 25 bp, Homo sapiens
ttgtatttttagtagagacgggggt

SEQ ID NO: 5732 - DNA, 25 bp, Homo sapiens
tgtatttttagtagagacgggggtt

SEQ ID NO: 5733 - DNA, 25 bp, Homo sapiens
gtatttttagtagagacgggggttt

SEQ ID NO: 5734 - DNA, 25 bp, Homo sapiens
tatttttagtagagacgggggtttc

SEQ ID NO: 5735 - DNA, 25 bp, Homo sapiens
atttttagtagagacgggggtttca

SEQ ID NO: 5736 - DNA, 25 bp, Homo sapiens
tttttagtagagacgggggtttcac

SEQ ID NO: 5737 - DNA, 25 bp, Homo sapiens
ttttagtagagacgggggtttcacc

SEQ ID NO: 5738 - DNA, 25 bp, Homo sapiens
tttagtagagacgggggtttcaccg

SEQ ID NO: 5739 - DNA, 25 bp, Homo sapiens
ttagtagagacgggggtttcaccgt

SEQ ID NO: 5740 - DNA, 25 bp, Homo sapiens
tagtagagacgggggtttcaccgtg

SEQ ID NO: 5741 - DNA, 25 bp, Homo sapiens
agtagagacgggggtttcaccgtgt

SEQ ID NO: 5742 - DNA, 25 bp, Homo sapiens
gtagagacgggggtttcaccgtgtt

SEQ ID NO: 5743 - DNA, 25 bp, Homo sapiens
tagagacgggggtttcaccgtgtta

SEQ ID NO: 5744 - DNA, 25 bp, Homo sapiens
agagacgggggtttcaccgtgttag

SEQ ID NO: 5745 - DNA, 25 bp, Homo sapiens
gagacgggggtttcaccgtgttagc

SEQ ID NO: 5746 - DNA, 25 bp, Homo sapiens
agacgggggtttcaccgtgttagcc

SEQ ID NO: 5747 - DNA, 25 bp, Homo sapiens
gacgggggtttcaccgtgttagcca

SEQ ID NO: 5748 - DNA, 25 bp, Homo sapiens
acgggggtttcaccgtgttagccag

SEQ ID NO: 5749 - DNA, 25 bp, Homo sapiens
cgggggtttcaccgtgttagccagg

SEQ ID NO: 5750 - DNA, 25 bp, Homo sapiens
gggggtttcaccgtgttagccagga

SEQ ID NO: 5751 - DNA, 25 bp, Homo sapiens
ggggtttcaccgtgttagccaggat

SEQ ID NO: 5752 - DNA, 25 bp, Homo sapiens
gggtttcaccgtgttagccaggatg

SEQ ID NO: 5753 - DNA, 25 bp, Homo sapiens
ggtttcaccgtgttagccaggatgg

SEQ ID NO: 5754 - DNA, 25 bp, Homo sapiens
gtttcaccgtgttagccaggatggt

SEQ ID NO: 5755 - DNA, 25 bp, Homo sapiens
tttcaccgtgttagccaggatggtc

SEQ ID NO: 5756 - DNA, 25 bp, Homo sapiens
ttcaccgtgttagccaggatggtct

SEQ ID NO: 5757 - DNA, 25 bp, Homo sapiens
tcaccgtgttagccaggatggtctc

SEQ ID NO: 5758 - DNA, 25 bp, Homo sapiens
caccgtgttagccaggatggtctcg

SEQ ID NO: 5759 - DNA, 25 bp, Homo sapiens
accgtgttagccaggatggtctcga

SEQ ID NO: 5760 - DNA, 25 bp, Homo sapiens
ccgtgttagccaggatggtctcgat

SEQ ID NO: 5761 - DNA, 25 bp, Homo sapiens
cgtgttagccaggatggtctcgatc

SEQ ID NO: 5762 - DNA, 25 bp, Homo sapiens
gtgttagccaggatggtctcgatct

SEQ ID NO: 5763 - DNA, 25 bp, Homo sapiens
tgttagccaggatggtctcgatctc

SEQ ID NO: 5764 - DNA, 25 bp, Homo sapiens
gttagccaggatggtctcgatctcc

SEQ ID NO: 5765 - DNA, 25 bp, Homo sapiens
ttagccaggatggtctcgatctcct

SEQ ID NO: 5766 - DNA, 25 bp, Homo sapiens
tagccaggatggtctcgatctcctg

SEQ ID NO: 5767 - DNA, 25 bp, Homo sapiens
agccaggatggtctcgatctcctga

SEQ ID NO: 5768 - DNA, 25 bp, Homo sapiens
gccaggatggtctcgatctcctgac

SEQ ID NO: 5769 - DNA, 25 bp, Homo sapiens
ccaggatggtctcgatctcctgact

SEQ ID NO: 5770 - DNA, 1780 bp, Homo sapiens
gaatcccggtcgggttctgggaggcaccgcctcggggttgcgggccgggtgcggctcggcggtggaggactcacttcctgctccatccccggctgggccctggggcggaactgatgacgcttgataatgtggctggggacttcagggaagagtgggttacctggacactgcttagagaatcctctccaggaatgccacccagcacagttagaagaatgggctctcaaaggaatttccaggcctagtgtaatctcccagccggagcagaaagaagagccatgggtcctaccactccaaaactttgaggcgaggaagatcccgagggaaagccacacagactgtgagcatcaggtggcaaagctcaatcaggacaattctgaaacagcagaacaatgtggaacatcctcagaaaggaccaataaagatctttctcatactcttagttggggaggaaactgggagcaaggcctagaattagaagggcaacatggaacccttccaggagagggccagctggagtccttttcacaggagagggatttaaacaagctcctggatggatatgtaggagagaagcctatgtgtgcagaatgcgggaaaagctttaaccagagttcctatctcataagacacctaagaacccacactggcgagaggccctatacgtgcattgagtgtgggaaaggcttcaaacagagctcagaccttgtcacccatcgcagaacacacacaggagagaagccctaccaatgcaaggggtgtgagaagaaattcagcgacagctcaacactcatcaaacatcagagaacccacacaggggagagaccctatgagtgcccagagtgtggaaagacttttgggcggaagccacacctcataatgcaccaaagaacccacacaggcgagaagccctacgcgtgcctggaatgtcacaaaagcttcagtcgaagctcaaatttcatcactcaccagaggacccacacaggggtgaagccttacaggtgtaatgactgtggggagagttttagccagagctcggatttgattaagcaccaacgaacccacacgggagaacggcccttcaaatgcccggagtgcgggaagggcttcagagatagttctcattttgtagctcacatgagcactcattcaggagagaggcctttcagttgtcctgactgccacaaaagcttcagtcagagctcacatttggtcacgcaccaaagaacacacacaggtgagagaccttttaagtgcgaaaactgtgggaaaggattcgccgacagctccgccctcattaagcaccaacgaatccacaccggagaaagaccctacaaatgtggagagtgtgggaagagcttcaatcagagctcccactttattacccatcagcgaatccacttaggagacaggccctatcgatgtcctgagtgtggcaagaccttcaatcagcgttcccatttcctcacacaccagagaacgcatacaggagaaaaacctttccactgtagtaaatgtaacaagagcttccgtcagaaagcgcatcttttatgccatcaaaacacccatttgatttaggaagtagtctttggtgttcagctgctcccttgcacattttcattgctactgtcttcaagcaccccaaatagagaaaacctgggcgtcagtggctcaatttgggccctgatctattctccctctttcttgtctatgttataacagagaggataaacttaaagggtccaaataacggtccaaaaaaaaaaaaaaaaaaaaaaaa

SEQ ID NO: 5771 - DNA, 1452 bp, Homo sapiens
atgtggctggggacttcagggaagagtgggttacctggacactgcttagagaatcctctccaggaatgccacccagcacagttagaagaatgggctctcaaaggaatttccaggcctagtgtaatctcccagccggagcagaaagaagagccatgggtcctaccactccaaaactttgaggcgaggaagatcccgagggaaagccacacagactgtgagcatcaggtggcaaagctcaatcaggacaattctgaaacagcagaacaatgtggaacatcctcagaaaggaccaataaagatctttctcatactcttagttggggaggaaactgggagcaaggcctagaattagaagggcaacatggaacccttccaggagagggccagctggagtccttttcacaggagagggatttaaacaagctcctggatggatatgtaggagagaagcctatgtgtgcagaatgcgggaaaagctttaaccagagttcctatctcataagacacctaagaacccacactggcgagaggccctatacgtgcattgagtgtgggaaaggcttcaaacagagctcagaccttgtcacccatcgcagaacacacacaggagagaagccctaccaatgcaaggggtgtgagaagaaattcagcgacagctcaacactcatcaaacatcagagaacccacacaggggagagaccctatgagtgcccagagtgtggaaagacttttgggcggaagccacacctcataatgcaccaaagaacccacacaggcgagaagccctacgcgtgcctggaatgtcacaaaagcttcagtcgaagctcaaatttcatcactcaccagaggacccacacaggggtgaagccttacaggtgtaatgactgtggggagagttttagccagagctcggatttgattaagcaccaacgaacccacacgggagaacggcccttcaaatgcccggagtgcgggaagggcttcagagatagttctcattttgtagctcacatgagcactcattcaggagagaggcctttcagttgtcctgactgccacaaaagcttcagtcagagctcacatttggtcacgcaccaaagaacacacacaggtgagagaccttttaagtgcgaaaactgtgggaaaggattcgccgacagctccgccctcattaagcaccaacgaatccacaccggagaaagaccctacaaatgtggagagtgtgggaagagcttcaatcagagctcccactttattacccatcagcgaatccacttaggagacaggccctatcgatgtcctgagtgtggcaagaccttcaatcagcgttcccatttcctcacacaccagagaacgcatacaggagaaaaacctttccactgtagtaaatgtaacaagagcttccgtcagaaagcgcatcttttatgccatcaaaacacccatttgatttag

SEQ ID NO: 5772 - protein, 483 aa, Homo sapiens
MWLGTSGKSGLPGHCLENPLQECHPAQLEEWALKGISRPSVISQPEQKEEPWVLPLQNFEARKIPRESHTDCEHQVAKLNQDNSETAEQCGTSSERTNKDLSHTLSWGGNWEQGLELEGQHGTLPGEGQLESFSQERDLNKLLDGYVGEKPMCAECGKSFNQSSYLIRHLRTHTGERPYTCIECGKGFKQSSDLVTHRRTHTGEKPYQCKGCEKKFSDSSTLIKHQRTHTGERPYECPECGKTFGRKPHLIMHQRTHTGEKPYACLECHKSFSRSSNFITHQRTHTGVKPYRCNDCGESFSQSSDLIKHQRTHTGERPFKCPECGKGFRDSSHFVAHMSTHSGERPFSCPDCHKSFSQSSHLVTHQRTHTGERPFKCENCGKGFADSSALIKHQRIHTGERPYKCGECGKSFNQSSHFITHQRIHLGDRPYRCPECGKTFNQRSHFLTHQRTHTGEKPFHCSKCNKSFRQKAHLLCHQNTHLI

SEQ ID NO: 5773 - DNA, 597 bp, Homo sapiens
gtggcaaagctcaatcaggacaattctgaaacagcagaacaatgtggaacatcctcagaaaggaccaataaagatctttctcatactcttagttggggaggaaactgggagcaaggcctagaattagaagggcaacatggaacccttccaggagagggccagctggagtccttttcacaggagagggatttaaacaagctcctggatggatatgtaggagagaagcctatgtgtgcagaatgcgggaaaagctttaaccagagttcctatctcataagacacctaagaacccacactggcgagaggccctatacgtgcattgagtgtgggaaaggcttcaaacagagctcagaccttgtcacccatcgcagaacacacacaggagagaagccctaccaatgcaaggggtgtgagaagaaattcagcgacagctcaacactcatcaaacatcagagaacccacacaggggagagaccctatgagtgcccagagtgtggaaagacttttgggcggaagccacacctcataatgcaccaaagaacccacacaggcgagaagccctacgcgtgcctggaatgtcacaaaagcttcagtcga

SEQ ID NO: 5774 - protein, 199 aa, Homo sapiens
VAKLNQDNSETAEQCGTSSERTNKDLSHTLSWGGNWEQGLELEGQHGTLPGEGQLESFSQERDLNKLLDGYVGEKPMCAECGKSFNQSSYLIRHLRTHTGERPYTCIECGKGFKQSSDLVTHRRTHTGEKPYQCKGCEKKFSDSSTLIKHQRTHTGERPYECPECGKTFGRKPHLIMHQRTHTGEKPYACLECHKSFSR

SEQ ID NO: 5775 - DNA, 107 bp, Homo sapiens
gaatcccggtcgggttctgggaggcaccgcctcggggttgcgggccgggtgcggctcggcggtggaggactcacttcctgctccatccccggctgggccctggggcg

SEQ ID NO: 5776 - DNA, 123 bp, Homo sapiens
gaactgatgacgcttgataatgtggctggggacttcagggaagagtgggttacctggacactgcttagagaatcctctccaggaatgccacccagcacagttagaagaatgggctctcaaagg

SEQ ID NO: 5777 - DNA, 107 bp, Homo sapiens
aatttccaggcctagtgtaatctcccagccggagcagaaagaagagccatgggtcctaccactccaaaactttgaggcgaggaagatcccgagggaaagccacacag

SEQ ID NO: 5778 - DNA, 1419 bp, Homo sapiens
actgtgagcatcaggtggcaaagctcaatcaggacaattctgaaacagcagaacaatgtggaacatcctcagaaaggaccaataaagatctttctcatactcttagttggggaggaaactgggagcaaggcctagaattagaagggcaacatggaacccttccaggagagggccagctggagtccttttcacaggagagggatttaaacaagctcctggatggatatgtaggagagaagcctatgtgtgcagaatgcgggaaaagctttaaccagagttcctatctcataagacacctaagaacccacactggcgagaggccctatacgtgcattgagtgtgggaaaggcttcaaacagagctcagaccttgtcacccatcgcagaacacacacaggagagaagccctaccaatgcaaggggtgtgagaagaaattcagcgacagctcaacactcatcaaacatcagagaacccacacaggggagagaccctatgagtgcccagagtgtggaaagacttttgggcggaagccacacctcataatgcaccaaagaacccacacaggcgagaagccctacgcgtgcctggaatgtcacaaaagcttcagtcgaagctcaaatttcatcactcaccagaggacccacacaggggtgaagccttacaggtgtaatgactgtggggagagttttagccagagctcggatttgattaagcaccaacgaacccacacgggagaacggcccttcaaatgcccggagtgcgggaagggcttcagagatagttctcattttgtagctcacatgagcactcattcaggagagaggcctttcagttgtcctgactgccacaaaagcttcagtcagagctcacatttggtcacgcaccaaagaacacacacaggtgagagaccttttaagtgcgaaaactgtgggaaaggattcgccgacagctccgccctcattaagcaccaacgaatccacaccggagaaagaccctacaaatgtggagagtgtgggaagagcttcaatcagagctcccactttattacccatcagcgaatccacttaggagacaggccctatcgatgtcctgagtgtggcaagaccttcaatcagcgttcccatttcctcacacaccagagaacgcatacaggagaaaaacctttccactgtagtaaatgtaacaagagcttccgtcagaaagcgcatcttttatgccatcaaaacacccatttgatttaggaagtagtctttggtgttcagctgctcccttgcacattttcattgctactgtcttcaagcaccccaaatagagaaaacctgggcgtcagtggctcaatttgggccctgatctattctccctctttcttgtctatgttataacagagaggataaacttaaagggtccaaataacggtcc

SEQ ID NO: 5779 - DNA, 500 bp, Homo sapiens
cgagtcctttgaggtcttcctcgggactacgtttcccagaaggctaggcgataattgacagctctatcagcctatggacagagaaaaattctagccatggaaactgaaaagccaatagcaagaggacgggggcggtactttccggccgctggctgtcgaagccggagtcccacctgtgtccccacagccctgtcacgaatcccggtcgggttctgggaggcaccgcctcggggttgcgggccgggtgcggctcggcggtggaggactcacttcctgctccatccccggctgggccctggggcggtgagtgattcaaggagggagaccgcggcggcagcggcgcgctgctgaggggcgtggagggggcttgcccgccacccagacgttttctcagcggggttcccgcgctggcctttgggagcccccgggtcttgctgggctgtgggagaggtagctgtggtctctataccgtcggcgggataagtcattctcttaatcag

SEQ ID NO: 5780 - DNA, 500 bp, Homo sapiens
ccaggagaagacgtatgtaaaaacagacttagaaaagcacccctctgtggttgacagaatttacctcaggaccattctggtcaggtgtggggggttgtttgtgtacactggtggccattttttggctttcagacaatggtgagaatatctagggagctactgatgcacattgaggtctcttgctttaggaactgatgacgcttgataatgtggctggggacttcagggaagagtgggttacctggacactgcttagagaatcctctccaggaatgccacccagcacagttagaagaatgggctctcaaagggtaagaatgctactctcctttatttcatttatttatcttgttttttttgagacggggtctcgctctgtcatccaggctggagtgcagtggcgcgatctcgattcactgcaatctgtgcctcctgggctcaagcgattctcccacctcaacctcctgagtagctgggatcacaggcatgtgccaccatgc

SEQ ID NO: 5781 - DNA, 500 bp, Homo sapiens
gcttttttttcttaacattttggggaaatcaccgtgttttatcactgtaccatggctgcacttttttaatgacaccaaatacacgttagagctccccaggtgttcttccatacctaggcagggagtagggcttggattttgctcaggccttgtgtgattggctcagactcacatcctatgtttacattcctgtgtagaatttccaggcctagtgtaatctcccagccggagcagaaagaagagccatgggtcctaccactccaaaactttgaggcgaggaagatcccgagggaaagccacacaggtgagatgtgagtgctccccagtggaaggaaatctagcatttcagccttgtttagatgaagaatttggaatgctgccttagaattttgttcttactagcagacattttttttttttttttttttttgagacggagtctcgctctgtcgcccaggccggactgcggactgcagtggcgcaatctcggctcactgcaa

SEQ ID NO: 5782 - DNA, 500 bp, Homo sapiens
aacatcagagaacccacacaggggagagaccctatgagtgcccagagtgtggaaagacttttgggcggaagccacacctcataatgcaccaaagaacccacacaggcgagaagccctacgcgtgcctggaatgtcacaaaagcttcagtcgaagctcaaatttcatcactcaccagaggacccacacaggggtgaagccttacaggtgtaatgactgtggggagagttttagccagagctcggatttgattaagcaccaacgaacccacacgggagaacggcccttcaaatgcccggagtgcgggaagggcttcagagatagttctcattttgtagctcacatgagcactcattcaggagagaggcctttcagttgtcctgactgccacaaaagcttcagtcagagctcacatttggtcacgcaccaaagaacacacacaggtgagagaccttttaagtgcgaaaactgtgggaaaggattcgccgacagctccgccctc

SEQ ID NO: 5783 - DNA, 1000 bp, Homo sapiens
ggtgtgaacctgggaggcagaactcgcagtgagccgagatcgtgccactgcactctagcctgggcgacagagcgagactccgtctaaaaaaaaaaaaaaaaaaaaactctatggctggtaattctaagcgttttataatacatcacaaaatgttcttttatttttctaaattgcactgaatcaacaaacggagtagacaggcacattttcttcactttaaggaaagactttgttgttttttagctaggggccgacccaaagtgatcactggctctcacatgagacccaggagcctccccagtttgaagcccgatatcacatttcccagaatacttgatgccctcgcccgcctcctctggctatcaaccagacggaaaggggatgtgcctgggagtttgatgccaagggaaggatgcggaatgtctgttttctactaagggcttctgctgggcctttccaatgtccagtttgagttggtctgggacctggcctccgcaaacaccctgcaggctccggccgccggggatgaggtggaagactgggcagaagagaggccgcaaaggcccgagggctgagctgctctgcgctggggaggggcgaagtgccagagcgcgggagacctcatggtgggcaccaggctgctccgcggtaggtgggtgaggccaggagattcacatctgcagatgccacagtgaggatacagcatttagatccctcggctccaaacaggcggttccgggggaccggtagctggggaattgggtttagcactttccaacgcttggaactggacatccacggctccgagtcctttgaggtcttgctcgggactacgtttcccagaaggctaggcgataattgacagctctatcagcctatggacagagaaaaattctagccatggaaactgaaaagccaatagcaagaggatgggggcggtactttccggccgctggctgtcgaagccggagtcccacctgtgtccccacagccctgtcac

SEQ ID NO: 5784 - DNA, 17 bp, Homo sapiens
gtggcaaagctcaatca

SEQ ID NO: 5785 - DNA, 17 bp, Homo sapiens
tggcaaagctcaatcag

SEQ ID NO: 5786 - DNA, 17 bp, Homo sapiens
ggcaaagctcaatcagg

SEQ ID NO: 5787 - DNA, 17 bp, Homo sapiens
gcaaagctcaatcagga

SEQ ID NO: 5788 - DNA, 17 bp, Homo sapiens
caaagctcaatcaggac

SEQ ID NO: 5789 - DNA, 17 bp, Homo sapiens
aaagctcaatcaggaca

SEQ ID NO: 5790 - DNA, 17 bp, Homo sapiens
aagctcaatcaggacaa

SEQ ID NO: 5791 - DNA, 17 bp, Homo sapiens
agctcaatcaggacaat

SEQ ID NO: 5792 - DNA, 17 bp, Homo sapiens
gctcaatcaggacaatt

SEQ ID NO: 5793 - DNA, 17 bp, Homo sapiens
ctcaatcaggacaattc

SEQ ID NO: 5794 - DNA, 17 bp, Homo sapiens
tcaatcaggacaattct

SEQ ID NO: 5795 - DNA, 17 bp, Homo sapiens
caatcaggacaattctg

SEQ ID NO: 5796 - DNA, 17 bp, Homo sapiens
aatcaggacaattctga

SEQ ID NO: 5797 - DNA, 17 bp, Homo sapiens
atcaggacaattctgaa

SEQ ID NO: 5798 - DNA, 17 bp, Homo sapiens
tcaggacaattctgaaa

SEQ ID NO: 5799 - DNA, 17 bp, Homo sapiens
caggacaattctgaaac

SEQ ID NO: 5800 - DNA, 17 bp, Homo sapiens
aggacaattctgaaaca

SEQ ID NO: 5801 - DNA, 17 bp, Homo sapiens
ggacaattctgaaacag

SEQ ID NO: 5802 - DNA, 17 bp, Homo sapiens
gacaattctgaaacagc

SEQ ID NO: 5803 - DNA, 17 bp, Homo sapiens
acaattctgaaacagca

SEQ ID NO: 5804 - DNA, 17 bp, Homo sapiens
caattctgaaacagcag

SEQ ID NO: 5805 - DNA, 17 bp, Homo sapiens
aattctgaaacagcaga

SEQ ID NO: 5806 - DNA, 17 bp, Homo sapiens
attctgaaacagcagaa

SEQ ID NO: 5807 - DNA, 17 bp, Homo sapiens
ttctgaaacagcagaac

SEQ ID NO: 5808 - DNA, 17 bp, Homo sapiens
tctgaaacagcagaaca

SEQ ID NO: 5809 - DNA, 17 bp, Homo sapiens
ctgaaacagcagaacaa

SEQ ID NO: 5810 - DNA, 17 bp, Homo sapiens
tgaaacagcagaacaat

SEQ ID NO: 5811 - DNA, 17 bp, Homo sapiens
gaaacagcagaacaatg

SEQ ID NO: 5812 - DNA, 17 bp, Homo sapiens
aaacagcagaacaatgt

SEQ ID NO: 5813 - DNA, 17 bp, Homo sapiens
aacagcagaacaatgtg

SEQ ID NO: 5814 - DNA, 17 bp, Homo sapiens
acagcagaacaatgtgg

SEQ ID NO: 5815 - DNA, 17 bp, Homo sapiens
cagcagaacaatgtgga

SEQ ID NO: 5816 - DNA, 17 bp, Homo sapiens
agcagaacaatgtggaa

SEQ ID NO: 5817 - DNA, 17 bp, Homo sapiens
gcagaacaatgtggaac

SEQ ID NO: 5818 - DNA, 17 bp, Homo sapiens
cagaacaatgtggaaca

SEQ ID NO: 5819 - DNA, 17 bp, Homo sapiens
agaacaatgtggaacat

SEQ ID NO: 5820 - DNA, 17 bp, Homo sapiens
gaacaatgtggaacatc

SEQ ID NO: 5821 - DNA, 17 bp, Homo sapiens
aacaatgtggaacatcc

SEQ ID NO: 5822 - DNA, 17 bp, Homo sapiens
acaatgtggaacatcct

SEQ ID NO: 5823 - DNA, 17 bp, Homo sapiens
caatgtggaacatcctc

SEQ ID NO: 5824 - DNA, 17 bp, Homo sapiens
aatgtggaacatcctca

SEQ ID NO: 5825 - DNA, 17 bp, Homo sapiens
atgtggaacatcctcag

SEQ ID NO: 5826 - DNA, 17 bp, Homo sapiens
tgtggaacatcctcaga

SEQ ID NO: 5827 - DNA, 17 bp, Homo sapiens
gtggaacatcctcagaa

SEQ ID NO: 5828 - DNA, 17 bp, Homo sapiens
tggaacatcctcagaaa

SEQ ID NO: 5829 - DNA, 17 bp, Homo sapiens
ggaacatcctcagaaag

SEQ ID NO: 5830 - DNA, 17 bp, Homo sapiens
gaacatcctcagaaagg

SEQ ID NO: 5831 - DNA, 17 bp, Homo sapiens
aacatcctcagaaagga

SEQ ID NO: 5832 - DNA, 17 bp, Homo sapiens
acatcctcagaaaggac

SEQ ID NO: 5833 - DNA, 17 bp, Homo sapiens
catcctcagaaaggacc

SEQ ID NO: 5834 - DNA, 17 bp, Homo sapiens
atcctcagaaaggacca

SEQ ID NO: 5835 - DNA, 17 bp, Homo sapiens
tcctcagaaaggaccaa

SEQ ID NO: 5836 - DNA, 17 bp, Homo sapiens
cctcagaaaggaccaat

SEQ ID NO: 5837 - DNA, 17 bp, Homo sapiens
ctcagaaaggaccaata

SEQ ID NO: 5838 - DNA, 17 bp, Homo sapiens
tcagaaaggaccaataa

SEQ ID NO: 5839 - DNA, 17 bp, Homo sapiens
cagaaaggaccaataaa

SEQ ID NO: 5840 - DNA, 17 bp, Homo sapiens
agaaaggaccaataaag

SEQ ID NO: 5841 - DNA, 17 bp, Homo sapiens
gaaaggaccaataaaga

SEQ ID NO: 5842 - DNA, 17 bp, Homo sapiens
aaaggaccaataaagat

SEQ ID NO: 5843 - DNA, 17 bp, Homo sapiens
aaggaccaataaagatc

SEQ ID NO: 5844 - DNA, 17 bp, Homo sapiens
aggaccaataaagatct

SEQ ID NO: 5845 - DNA, 17 bp, Homo sapiens
ggaccaataaagatctt

SEQ ID NO: 5846 - DNA, 17 bp, Homo sapiens
gaccaataaagatcttt

SEQ ID NO: 5847 - DNA, 17 bp, Homo sapiens
accaataaagatctttc

SEQ ID NO: 5848 - DNA, 17 bp, Homo sapiens
ccaataaagatctttct

SEQ ID NO: 5849 - DNA, 17 bp, Homo sapiens
caataaagatctttctc

SEQ ID NO: 5850 - DNA, 17 bp, Homo sapiens
aataaagatctttctca

SEQ ID NO: 5851 - DNA, 17 bp, Homo sapiens
ataaagatctttctcat

SEQ ID NO: 5852 - DNA, 17 bp, Homo sapiens
taaagatctttctcata

SEQ ID NO: 5853 - DNA, 17 bp, Homo sapiens
aaagatctttctcatac

SEQ ID NO: 5854 - DNA, 17 bp, Homo sapiens
aagatctttctcatact

SEQ ID NO: 5855 - DNA, 17 bp, Homo sapiens
agatctttctcatactc

SEQ ID NO: 5856 - DNA, 17 bp, Homo sapiens
gatctttctcatactct

SEQ ID NO: 5857 - DNA, 17 bp, Homo sapiens
atctttctcatactctt

SEQ ID NO: 5858 - DNA, 17 bp, Homo sapiens
tctttctcatactctta

SEQ ID NO: 5859 - DNA, 17 bp, Homo sapiens
ctttctcatactcttag

SEQ ID NO: 5860 - DNA, 17 bp, Homo sapiens
tttctcatactcttagt

SEQ ID NO: 5861 - DNA, 17 bp, Homo sapiens
ttctcatactcttagtt

SEQ ID NO: 5862 - DNA, 17 bp, Homo sapiens
tctcatactcttagttg

SEQ ID NO: 5863 - DNA, 17 bp, Homo sapiens
ctcatactcttagttgg

SEQ ID NO: 5864 - DNA, 17 bp, Homo sapiens
tcatactcttagttggg

SEQ ID NO: 5865 - DNA, 17 bp, Homo sapiens
catactcttagttgggg

SEQ ID NO: 5866 - DNA, 17 bp, Homo sapiens
atactcttagttgggga

SEQ ID NO: 5867 - DNA, 17 bp, Homo sapiens
tactcttagttggggag

SEQ ID NO: 5868 - DNA, 17 bp, Homo sapiens
actcttagttggggagg

SEQ ID NO: 5869 - DNA, 17 bp, Homo sapiens
ctcttagttggggagga

SEQ ID NO: 5870 - DNA, 17 bp, Homo sapiens
tcttagttggggaggaa

SEQ ID NO: 5871 - DNA, 17 bp, Homo sapiens
cttagttggggaggaaa

SEQ ID NO: 5872 - DNA, 17 bp, Homo sapiens
ttagttggggaggaaac

SEQ ID NO: 5873 - DNA, 17 bp, Homo sapiens
tagttggggaggaaact

SEQ ID NO: 5874 - DNA, 17 bp, Homo sapiens
agttggggaggaaactg

SEQ ID NO: 5875 - DNA, 17 bp, Homo sapiens
gttggggaggaaactgg

SEQ ID NO: 5876 - DNA, 17 bp, Homo sapiens
ttggggaggaaactggg

SEQ ID NO: 5877 - DNA, 17 bp, Homo sapiens
tggggaggaaactggga

SEQ ID NO: 5878 - DNA, 17 bp, Homo sapiens
ggggaggaaactgggag

SEQ ID NO: 5879 - DNA, 17 bp, Homo sapiens
gggaggaaactgggagc

SEQ ID NO: 5880 - DNA, 17 bp, Homo sapiens
ggaggaaactgggagca

SEQ ID NO: 5881 - DNA, 17 bp, Homo sapiens
gaggaaactgggagcaa

SEQ ID NO: 5882 - DNA, 17 bp, Homo sapiens
aggaaactgggagcaag

SEQ ID NO: 5883 - DNA, 17 bp, Homo sapiens
ggaaactgggagcaagg

SEQ ID NO: 5884 - DNA, 17 bp, Homo sapiens
gaaactgggagcaaggc

SEQ ID NO: 5885 - DNA, 17 bp, Homo sapiens
aaactgggagcaaggcc

SEQ ID NO: 5886 - DNA, 17 bp, Homo sapiens
aactgggagcaaggcct

SEQ ID NO: 5887 - DNA, 17 bp, Homo sapiens
actgggagcaaggccta

SEQ ID NO: 5888 - DNA, 17 bp, Homo sapiens
ctgggagcaaggcctag

SEQ ID NO: 5889 - DNA, 17 bp, Homo sapiens
tgggagcaaggcctaga

SEQ ID NO: 5890 - DNA, 17 bp, Homo sapiens
gggagcaaggcctagaa

SEQ ID NO: 5891 - DNA, 17 bp, Homo sapiens
ggagcaaggcctagaat

SEQ ID NO: 5892 - DNA, 17 bp, Homo sapiens
gagcaaggcctagaatt

SEQ ID NO: 5893 - DNA, 17 bp, Homo sapiens
agcaaggcctagaatta

SEQ ID NO: 5894 - DNA, 17 bp, Homo sapiens
gcaaggcctagaattag

SEQ ID NO: 5895 - DNA, 17 bp, Homo sapiens
caaggcctagaattaga

SEQ ID NO: 5896 - DNA, 17 bp, Homo sapiens
aaggcctagaattagaa

SEQ ID NO: 5897 - DNA, 17 bp, Homo sapiens
aggcctagaattagaag

SEQ ID NO: 5898 - DNA, 17 bp, Homo sapiens
ggcctagaattagaagg

SEQ ID NO: 5899 - DNA, 17 bp, Homo sapiens
gcctagaattagaaggg

SEQ ID NO: 5900 - DNA, 17 bp, Homo sapiens
cctagaattagaagggc

SEQ ID NO: 5901 - DNA, 17 bp, Homo sapiens
ctagaattagaagggca

SEQ ID NO: 5902 - DNA, 17 bp, Homo sapiens
tagaattagaagggcaa

SEQ ID NO: 5903 - DNA, 17 bp, Homo sapiens
agaattagaagggcaac

SEQ ID NO: 5904 - DNA, 17 bp, Homo sapiens
gaattagaagggcaaca

SEQ ID NO: 5905 - DNA, 17 bp, Homo sapiens
aattagaagggcaacat

SEQ ID NO: 5906 - DNA, 17 bp, Homo sapiens
attagaagggcaacatg

SEQ ID NO: 5907 - DNA, 17 bp, Homo sapiens
ttagaagggcaacatgg

SEQ ID NO: 5908 - DNA, 17 bp, Homo sapiens
tagaagggcaacatgga

SEQ ID NO: 5909 - DNA, 17 bp, Homo sapiens
agaagggcaacatggaa

SEQ ID NO: 5910 - DNA, 17 bp, Homo sapiens
gaagggcaacatggaac

SEQ ID NO: 5911 - DNA, 17 bp, Homo sapiens
aagggcaacatggaacc

SEQ ID NO: 5912 - DNA, 17 bp, Homo sapiens
agggcaacatggaaccc

SEQ ID NO: 5913 - DNA, 17 bp, Homo sapiens
gggcaacatggaaccct

SEQ ID NO: 5914 - DNA, 17 bp, Homo sapiens
ggcaacatggaaccctt

SEQ ID NO: 5915 - DNA, 17 bp, Homo sapiens
gcaacatggaacccttc

SEQ ID NO: 5916 - DNA, 17 bp, Homo sapiens
caacatggaacccttcc

SEQ ID NO: 5917 - DNA, 17 bp, Homo sapiens
aacatggaacccttcca

SEQ ID NO: 5918 - DNA, 17 bp, Homo sapiens
acatggaacccttccag

SEQ ID NO: 5919 - DNA, 17 bp, Homo sapiens
catggaacccttccagg

SEQ ID NO: 5920 - DNA, 17 bp, Homo sapiens
atggaacccttccagga

SEQ ID NO: 5921 - DNA, 17 bp, Homo sapiens
tggaacccttccaggag

SEQ ID NO: 5922 - DNA, 17 bp, Homo sapiens
ggaacccttccaggaga

SEQ ID NO: 5923 - DNA, 17 bp, Homo sapiens
gaacccttccaggagag

SEQ ID NO: 5924 - DNA, 17 bp, Homo sapiens
aacccttccaggagagg

SEQ ID NO: 5925 - DNA, 17 bp, Homo sapiens
acccttccaggagaggg

SEQ ID NO: 5926 - DNA, 17 bp, Homo sapiens
cccttccaggagagggc

SEQ ID NO: 5927 - DNA, 17 bp, Homo sapiens
ccttccaggagagggcc

SEQ ID NO: 5928 - DNA, 17 bp, Homo sapiens
cttccaggagagggcca

SEQ ID NO: 5929 - DNA, 17 bp, Homo sapiens
ttccaggagagggccag

SEQ ID NO: 5930 - DNA, 17 bp, Homo sapiens
tccaggagagggccagc

SEQ ID NO: 5931 - DNA, 17 bp, Homo sapiens
ccaggagagggccagct

SEQ ID NO: 5932 - DNA, 17 bp, Homo sapiens
caggagagggccagctg

SEQ ID NO: 5933 - DNA, 17 bp, Homo sapiens
aggagagggccagctgg

SEQ ID NO: 5934 - DNA, 17 bp, Homo sapiens
ggagagggccagctgga

SEQ ID NO: 5935 - DNA, 17 bp, Homo sapiens
gagagggccagctggag

SEQ ID NO: 5936 - DNA, 17 bp, Homo sapiens
agagggccagctggagt

SEQ ID NO: 5937 - DNA, 17 bp, Homo sapiens
gagggccagctggagtc

SEQ ID NO: 5938 - DNA, 17 bp, Homo sapiens
agggccagctggagtcc

SEQ ID NO: 5939 - DNA, 17 bp, Homo sapiens
gggccagctggagtcct

SEQ ID NO: 5940 - DNA, 17 bp, Homo sapiens
ggccagctggagtcctt

SEQ ID NO: 5941 - DNA, 17 bp, Homo sapiens
gccagctggagtccttt

SEQ ID NO: 5942 - DNA, 17 bp, Homo sapiens
ccagctggagtcctttt

SEQ ID NO: 5943 - DNA, 17 bp, Homo sapiens
cagctggagtccttttc

SEQ ID NO: 5944 - DNA, 17 bp, Homo sapiens
agctggagtccttttca

SEQ ID NO: 5945 - DNA, 17 bp, Homo sapiens
gctggagtccttttcac

SEQ ID NO: 5946 - DNA, 17 bp, Homo sapiens
ctggagtccttttcaca

SEQ ID NO: 5947 - DNA, 17 bp, Homo sapiens
tggagtccttttcacag

SEQ ID NO: 5948 - DNA, 17 bp, Homo sapiens
ggagtccttttcacagg

SEQ ID NO: 5949 - DNA, 17 bp, Homo sapiens
gagtccttttcacagga

SEQ ID NO: 5950 - DNA, 17 bp, Homo sapiens
agtccttttcacaggag

SEQ ID NO: 5951 - DNA, 17 bp, Homo sapiens
gtccttttcacaggaga

SEQ ID NO: 5952 - DNA, 17 bp, Homo sapiens
tccttttcacaggagag

SEQ ID NO: 5953 - DNA, 17 bp, Homo sapiens
ccttttcacaggagagg

SEQ ID NO: 5954 - DNA, 17 bp, Homo sapiens
cttttcacaggagaggg

SEQ ID NO: 5955 - DNA, 17 bp, Homo sapiens
ttttcacaggagaggga

SEQ ID NO: 5956 - DNA, 17 bp, Homo sapiens
tttcacaggagagggat

SEQ ID NO: 5957 - DNA, 17 bp, Homo sapiens
ttcacaggagagggatt

SEQ ID NO: 5958 - DNA, 17 bp, Homo sapiens
tcacaggagagggattt

SEQ ID NO: 5959 - DNA, 17 bp, Homo sapiens
cacaggagagggattta

SEQ ID NO: 5960 - DNA, 17 bp, Homo sapiens
acaggagagggatttaa

SEQ ID NO: 5961 - DNA, 17 bp, Homo sapiens
caggagagggatttaaa

SEQ ID NO: 5962 - DNA, 17 bp, Homo sapiens
aggagagggatttaaac

SEQ ID NO: 5963 - DNA, 17 bp, Homo sapiens
ggagagggatttaaaca

SEQ ID NO: 5964 - DNA, 17 bp, Homo sapiens
gagagggatttaaacaa

SEQ ID NO: 5965 - DNA, 17 bp, Homo sapiens
agagggatttaaacaag

SEQ ID NO: 5966 - DNA, 17 bp, Homo sapiens
gagggatttaaacaagc

SEQ ID NO: 5967 - DNA, 17 bp, Homo sapiens
agggatttaaacaagct

SEQ ID NO: 5968 - DNA, 17 bp, Homo sapiens
gggatttaaacaagctc

SEQ ID NO: 5969 - DNA, 17 bp, Homo sapiens
ggatttaaacaagctcc

SEQ ID NO: 5970 - DNA, 17 bp, Homo sapiens
gatttaaacaagctcct

SEQ ID NO: 5971 - DNA, 17 bp, Homo sapiens
atttaaacaagctcctg

SEQ ID NO: 5972 - DNA, 17 bp, Homo sapiens
tttaaacaagctcctgg

SEQ ID NO: 5973 - DNA, 17 bp, Homo sapiens
ttaaacaagctcctgga

SEQ ID NO: 5974 - DNA, 17 bp, Homo sapiens
taaacaagctcctggat

SEQ ID NO: 5975 - DNA, 17 bp, Homo sapiens
aaacaagctcctggatg

SEQ ID NO: 5976 - DNA, 17 bp, Homo sapiens
aacaagctcctggatgg

SEQ ID NO: 5977 - DNA, 17 bp, Homo sapiens
acaagctcctggatgga

SEQ ID NO: 5978 - DNA, 17 bp, Homo sapiens
caagctcctggatggat

SEQ ID NO: 5979 - DNA, 17 bp, Homo sapiens
aagctcctggatggata

SEQ ID NO: 5980 - DNA, 17 bp, Homo sapiens
agctcctggatggatat

SEQ ID NO: 5981 - DNA, 17 bp, Homo sapiens
gctcctggatggatatg

SEQ ID NO: 5982 - DNA, 17 bp, Homo sapiens
ctcctggatggatatgt

SEQ ID NO: 5983 - DNA, 17 bp, Homo sapiens
tcctggatggatatgta

SEQ ID NO: 5984 - DNA, 17 bp, Homo sapiens
cctggatggatatgtag

SEQ ID NO: 5985 - DNA, 17 bp, Homo sapiens
ctggatggatatgtagg

SEQ ID NO: 5986 - DNA, 17 bp, Homo sapiens
tggatggatatgtagga

SEQ ID NO: 5987 - DNA, 17 bp, Homo sapiens
ggatggatatgtaggag

SEQ ID NO: 5988 - DNA, 17 bp, Homo sapiens
gatggatatgtaggaga

SEQ ID NO: 5989 - DNA, 17 bp, Homo sapiens
atggatatgtaggagag

SEQ ID NO: 5990 - DNA, 17 bp, Homo sapiens
tggatatgtaggagaga

SEQ ID NO: 5991 - DNA, 17 bp, Homo sapiens
ggatatgtaggagagaa

SEQ ID NO: 5992 - DNA, 17 bp, Homo sapiens
gatatgtaggagagaag

SEQ ID NO: 5993 - DNA, 17 bp, Homo sapiens
atatgtaggagagaagc

SEQ ID NO: 5994 - DNA, 17 bp, Homo sapiens
tatgtaggagagaagcc

SEQ ID NO: 5995 - DNA, 17 bp, Homo sapiens
atgtaggagagaagcct

SEQ ID NO: 5996 - DNA, 17 bp, Homo sapiens
tgtaggagagaagccta

SEQ ID NO: 5997 - DNA, 17 bp, Homo sapiens
gtaggagagaagcctat

SEQ ID NO: 5998 - DNA, 17 bp, Homo sapiens
taggagagaagcctatg

SEQ ID NO: 5999 - DNA, 17 bp, Homo sapiens
aggagagaagcctatgt

SEQ ID NO: 6000 - DNA, 17 bp, Homo sapiens
ggagagaagcctatgtg

SEQ ID NO: 6001 - DNA, 17 bp, Homo sapiens
gagagaagcctatgtgt

SEQ ID NO: 6002 - DNA, 17 bp, Homo sapiens
agagaagcctatgtgtg

SEQ ID NO: 6003 - DNA, 17 bp, Homo sapiens
gagaagcctatgtgtgc

SEQ ID NO: 6004 - DNA, 17 bp, Homo sapiens
agaagcctatgtgtgca

SEQ ID NO: 6005 - DNA, 17 bp, Homo sapiens
gaagcctatgtgtgcag

SEQ ID NO: 6006 - DNA, 17 bp, Homo sapiens
aagcctatgtgtgcaga

SEQ ID NO: 6007 - DNA, 17 bp, Homo sapiens
agcctatgtgtgcagaa

SEQ ID NO: 6008 - DNA, 17 bp, Homo sapiens
gcctatgtgtgcagaat

SEQ ID NO: 6009 - DNA, 17 bp, Homo sapiens
cctatgtgtgcagaatg

SEQ ID NO: 6010 - DNA, 17 bp, Homo sapiens
ctatgtgtgcagaatgc

SEQ ID NO: 6011 - DNA, 17 bp, Homo sapiens
tatgtgtgcagaatgcg

SEQ ID NO: 6012 - DNA, 17 bp, Homo sapiens
atgtgtgcagaatgcgg

SEQ ID NO: 6013 - DNA, 17 bp, Homo sapiens
tgtgtgcagaatgcggg

SEQ ID NO: 6014 - DNA, 17 bp, Homo sapiens
gtgtgcagaatgcggga

SEQ ID NO: 6015 - DNA, 17 bp, Homo sapiens
tgtgcagaatgcgggaa

SEQ ID NO: 6016 - DNA, 17 bp, Homo sapiens
gtgcagaatgcgggaaa

SEQ ID NO: 6017 - DNA, 17 bp, Homo sapiens
tgcagaatgcgggaaaa

SEQ ID NO: 6018 - DNA, 17 bp, Homo sapiens
gcagaatgcgggaaaag

SEQ ID NO: 6019 - DNA, 17 bp, Homo sapiens
cagaatgcgggaaaagc

SEQ ID NO: 6020 - DNA, 17 bp, Homo sapiens
agaatgcgggaaaagct

SEQ ID NO: 6021 - DNA, 17 bp, Homo sapiens
gaatgcgggaaaagctt

SEQ ID NO: 6022 - DNA, 17 bp, Homo sapiens
aatgcgggaaaagcttt

SEQ ID NO: 6023 - DNA, 17 bp, Homo sapiens
atgcgggaaaagcttta

SEQ ID NO: 6024 - DNA, 17 bp, Homo sapiens
tgcgggaaaagctttaa

SEQ ID NO: 6025 - DNA, 17 bp, Homo sapiens
gcgggaaaagctttaac

SEQ ID NO: 6026 - DNA, 17 bp, Homo sapiens
cgggaaaagctttaacc

SEQ ID NO: 6027 - DNA, 17 bp, Homo sapiens
gggaaaagctttaacca

SEQ ID NO: 6028 - DNA, 17 bp, Homo sapiens
ggaaaagctttaaccag

SEQ ID NO: 6029 - DNA, 17 bp, Homo sapiens
gaaaagctttaaccaga

SEQ ID NO: 6030 - DNA, 17 bp, Homo sapiens
aaaagctttaaccagag

SEQ ID NO: 6031 - DNA, 17 bp, Homo sapiens
aaagctttaaccagagt

SEQ ID NO: 6032 - DNA, 17 bp, Homo sapiens
aagctttaaccagagtt

SEQ ID NO: 6033 - DNA, 17 bp, Homo sapiens
agctttaaccagagttc

SEQ ID NO: 6034 - DNA, 17 bp, Homo sapiens
gctttaaccagagttcc

SEQ ID NO: 6035 - DNA, 17 bp, Homo sapiens
ctttaaccagagttcct

SEQ ID NO: 6036 - DNA, 17 bp, Homo sapiens
tttaaccagagttccta

SEQ ID NO: 6037 - DNA, 17 bp, Homo sapiens
ttaaccagagttcctat

SEQ ID NO: 6038 - DNA, 17 bp, Homo sapiens
taaccagagttcctatc

SEQ ID NO: 6039 - DNA, 17 bp, Homo sapiens
aaccagagttcctatct

SEQ ID NO: 6040 - DNA, 17 bp, Homo sapiens
accagagttcctatctc

SEQ ID NO: 6041 - DNA, 17 bp, Homo sapiens
ccagagttcctatctca

SEQ ID NO: 6042 - DNA, 17 bp, Homo sapiens
cagagttcctatctcat

SEQ ID NO: 6043 - DNA, 17 bp, Homo sapiens
agagttcctatctcata

SEQ ID NO: 6044 - DNA, 17 bp, Homo sapiens
gagttcctatctcataa

SEQ ID NO: 6045 - DNA, 17 bp, Homo sapiens
agttcctatctcataag

SEQ ID NO: 6046 - DNA, 17 bp, Homo sapiens
gttcctatctcataaga

SEQ ID NO: 6047 - DNA, 17 bp, Homo sapiens
ttcctatctcataagac

SEQ ID NO: 6048 - DNA, 17 bp, Homo sapiens
tcctatctcataagaca

SEQ ID NO: 6049 - DNA, 17 bp, Homo sapiens
cctatctcataagacac

SEQ ID NO: 6050 - DNA, 17 bp, Homo sapiens
ctatctcataagacacc

SEQ ID NO: 6051 - DNA, 17 bp, Homo sapiens
tatctcataagacacct

SEQ ID NO: 6052 - DNA, 17 bp, Homo sapiens
atctcataagacaccta

SEQ ID NO: 6053 - DNA, 17 bp, Homo sapiens
tctcataagacacctaa

SEQ ID NO: 6054 - DNA, 17 bp, Homo sapiens
ctcataagacacctaag

SEQ ID NO: 6055 - DNA, 17 bp, Homo sapiens
tcataagacacctaaga

SEQ ID NO: 6056 - DNA, 17 bp, Homo sapiens
cataagacacctaagaa

SEQ ID NO: 6057 - DNA, 17 bp, Homo sapiens
ataagacacctaagaac

SEQ ID NO: 6058 - DNA, 17 bp, Homo sapiens
taagacacctaagaacc

SEQ ID NO: 6059 - DNA, 17 bp, Homo sapiens
aagacacctaagaaccc

SEQ ID NO: 6060 - DNA, 17 bp, Homo sapiens
agacacctaagaaccca

SEQ ID NO: 6061 - DNA, 17 bp, Homo sapiens
gacacctaagaacccac

SEQ ID NO: 6062 - DNA, 17 bp, Homo sapiens
acacctaagaacccaca

SEQ ID NO: 6063 - DNA, 17 bp, Homo sapiens
cacctaagaacccacac

SEQ ID NO: 6064 - DNA, 17 bp, Homo sapiens
acctaagaacccacact

SEQ ID NO: 6065 - DNA, 17 bp, Homo sapiens
cctaagaacccacactg

SEQ ID NO: 6066 - DNA, 17 bp, Homo sapiens
ctaagaacccacactgg

SEQ ID NO: 6067 - DNA, 17 bp, Homo sapiens
taagaacccacactggc

SEQ ID NO: 6068 - DNA, 17 bp, Homo sapiens
aagaacccacactggcg

SEQ ID NO: 6069 - DNA, 17 bp, Homo sapiens
agaacccacactggcga

SEQ ID NO: 6070 - DNA, 17 bp, Homo sapiens
gaacccacactggcgag

SEQ ID NO: 6071 - DNA, 17 bp, Homo sapiens
aacccacactggcgaga

SEQ ID NO: 6072 - DNA, 17 bp, Homo sapiens
acccacactggcgagag

SEQ ID NO: 6073 - DNA, 17 bp, Homo sapiens
cccacactggcgagagg

SEQ ID NO: 6074 - DNA, 17 bp, Homo sapiens
ccacactggcgagaggc

SEQ ID NO: 6075 - DNA, 17 bp, Homo sapiens
cacactggcgagaggcc

SEQ ID NO: 6076 - DNA, 17 bp, Homo sapiens
acactggcgagaggccc

SEQ ID NO: 6077 - DNA, 17 bp, Homo sapiens
cactggcgagaggccct

SEQ ID NO: 6078 - DNA, 17 bp, Homo sapiens
actggcgagaggcccta

SEQ ID NO: 6079 - DNA, 17 bp, Homo sapiens
ctggcgagaggccctat

SEQ ID NO: 6080 - DNA, 17 bp, Homo sapiens
tggcgagaggccctata

SEQ ID NO: 6081 - DNA, 17 bp, Homo sapiens
ggcgagaggccctatac

SEQ ID NO: 6082 - DNA, 17 bp, Homo sapiens
gcgagaggccctatacg

SEQ ID NO: 6083 - DNA, 17 bp, Homo sapiens
cgagaggccctatacgt

SEQ ID NO: 6084 - DNA, 17 bp, Homo sapiens
gagaggccctatacgtg

SEQ ID NO: 6085 - DNA, 17 bp, Homo sapiens
agaggccctatacgtgc

SEQ ID NO: 6086 - DNA, 17 bp, Homo sapiens
gaggccctatacgtgca

SEQ ID NO: 6087 - DNA, 17 bp, Homo sapiens
aggccctatacgtgcat

SEQ ID NO: 6088 - DNA, 17 bp, Homo sapiens
ggccctatacgtgcatt

SEQ ID NO: 6089 - DNA, 17 bp, Homo sapiens
gccctatacgtgcattg

SEQ ID NO: 6090 - DNA, 17 bp, Homo sapiens
ccctatacgtgcattga

SEQ ID NO: 6091 - DNA, 17 bp, Homo sapiens
cctatacgtgcattgag

SEQ ID NO: 6092 - DNA, 17 bp, Homo sapiens
ctatacgtgcattgagt

SEQ ID NO: 6093 - DNA, 17 bp, Homo sapiens
tatacgtgcattgagtg

SEQ ID NO: 6094 - DNA, 17 bp, Homo sapiens
atacgtgcattgagtgt

SEQ ID NO: 6095 - DNA, 17 bp, Homo sapiens
tacgtgcattgagtgtg

SEQ ID NO: 6096 - DNA, 17 bp, Homo sapiens
acgtgcattgagtgtgg

SEQ ID NO: 6097 - DNA, 17 bp, Homo sapiens
cgtgcattgagtgtggg

SEQ ID NO: 6098 - DNA, 17 bp, Homo sapiens
gtgcattgagtgtggga

SEQ ID NO: 6099 - DNA, 17 bp, Homo sapiens
tgcattgagtgtgggaa

SEQ ID NO: 6100 - DNA, 17 bp, Homo sapiens
gcattgagtgtgggaaa

SEQ ID NO: 6101 - DNA, 17 bp, Homo sapiens
cattgagtgtgggaaag

SEQ ID NO: 6102 - DNA, 17 bp, Homo sapiens
attgagtgtgggaaagg

SEQ ID NO: 6103 - DNA, 17 bp, Homo sapiens
ttgagtgtgggaaaggc

SEQ ID NO: 6104 - DNA, 17 bp, Homo sapiens
tgagtgtgggaaaggct

SEQ ID NO: 6105 - DNA, 17 bp, Homo sapiens
gagtgtgggaaaggctt

SEQ ID NO: 6106 - DNA, 17 bp, Homo sapiens
agtgtgggaaaggcttc

SEQ ID NO: 6107 - DNA, 17 bp, Homo sapiens
gtgtgggaaaggcttca

SEQ ID NO: 6108 - DNA, 17 bp, Homo sapiens
tgtgggaaaggcttcaa

SEQ ID NO: 6109 - DNA, 17 bp, Homo sapiens
gtgggaaaggcttcaaa

SEQ ID NO: 6110 - DNA, 17 bp, Homo sapiens
tgggaaaggcttcaaac

SEQ ID NO: 6111 - DNA, 17 bp, Homo sapiens
gggaaaggcttcaaaca

SEQ ID NO: 6112 - DNA, 17 bp, Homo sapiens
ggaaaggcttcaaacag

SEQ ID NO: 6113 - DNA, 17 bp, Homo sapiens
gaaaggcttcaaacaga

SEQ ID NO: 6114 - DNA, 17 bp, Homo sapiens
aaaggcttcaaacagag

SEQ ID NO: 6115 - DNA, 17 bp, Homo sapiens
aaggcttcaaacagagc

SEQ ID NO: 6116 - DNA, 17 bp, Homo sapiens
aggcttcaaacagagct

SEQ ID NO: 6117 - DNA, 17 bp, Homo sapiens
ggcttcaaacagagctc

SEQ ID NO: 6118 - DNA, 17 bp, Homo sapiens
gcttcaaacagagctca

SEQ ID NO: 6119 - DNA, 17 bp, Homo sapiens
cttcaaacagagctcag

SEQ ID NO: 6120 - DNA, 17 bp, Homo sapiens
ttcaaacagagctcaga

SEQ ID NO: 6121 - DNA, 17 bp, Homo sapiens
tcaaacagagctcagac

SEQ ID NO: 6122 - DNA, 17 bp, Homo sapiens
caaacagagctcagacc

SEQ ID NO: 6123 - DNA, 17 bp, Homo sapiens
aaacagagctcagacct

SEQ ID NO: 6124 - DNA, 17 bp, Homo sapiens
aacagagctcagacctt

SEQ ID NO: 6125 - DNA, 17 bp, Homo sapiens
acagagctcagaccttg

SEQ ID NO: 6126 - DNA, 17 bp, Homo sapiens
cagagctcagaccttgt

SEQ ID NO: 6127 - DNA, 17 bp, Homo sapiens
agagctcagaccttgtc

SEQ ID NO: 6128 - DNA, 17 bp, Homo sapiens
gagctcagaccttgtca

SEQ ID NO: 6129 - DNA, 17 bp, Homo sapiens
agctcagaccttgtcac

SEQ ID NO: 6130 - DNA, 17 bp, Homo sapiens
gctcagaccttgtcacc

SEQ ID NO: 6131 - DNA, 17 bp, Homo sapiens
ctcagaccttgtcaccc

SEQ ID NO: 6132 - DNA, 17 bp, Homo sapiens
tcagaccttgtcaccca

SEQ ID NO: 6133 - DNA, 17 bp, Homo sapiens
cagaccttgtcacccat

SEQ ID NO: 6134 - DNA, 17 bp, Homo sapiens
agaccttgtcacccatc

SEQ ID NO: 6135 - DNA, 17 bp, Homo sapiens
gaccttgtcacccatcg

SEQ ID NO: 6136 - DNA, 17 bp, Homo sapiens
accttgtcacccatcgc

SEQ ID NO: 6137 - DNA, 17 bp, Homo sapiens
ccttgtcacccatcgca

SEQ ID NO: 6138 - DNA, 17 bp, Homo sapiens
cttgtcacccatcgcag

SEQ ID NO: 6139 - DNA, 17 bp, Homo sapiens
ttgtcacccatcgcaga

SEQ ID NO: 6140 - DNA, 17 bp, Homo sapiens
tgtcacccatcgcagaa

SEQ ID NO: 6141 - DNA, 17 bp, Homo sapiens
gtcacccatcgcagaac

SEQ ID NO: 6142 - DNA, 17 bp, Homo sapiens
tcacccatcgcagaaca

SEQ ID NO: 6143 - DNA, 17 bp, Homo sapiens
cacccatcgcagaacac

SEQ ID NO: 6144 - DNA, 17 bp, Homo sapiens
acccatcgcagaacaca

SEQ ID NO: 6145 - DNA, 17 bp, Homo sapiens
cccatcgcagaacacac

SEQ ID NO: 6146 - DNA, 17 bp, Homo sapiens
ccatcgcagaacacaca

SEQ ID NO: 6147 - DNA, 17 bp, Homo sapiens
catcgcagaacacacac

SEQ ID NO: 6148 - DNA, 17 bp, Homo sapiens
atcgcagaacacacaca

SEQ ID NO: 6149 - DNA, 17 bp, Homo sapiens
tcgcagaacacacacag

SEQ ID NO: 6150 - DNA, 17 bp, Homo sapiens
cgcagaacacacacagg

SEQ ID NO: 6151 - DNA, 17 bp, Homo sapiens
gcagaacacacacagga

SEQ ID NO: 6152 - DNA, 17 bp, Homo sapiens
cagaacacacacaggag

SEQ ID NO: 6153 - DNA, 17 bp, Homo sapiens
agaacacacacaggaga

SEQ ID NO: 6154 - DNA, 17 bp, Homo sapiens
gaacacacacaggagag

SEQ ID NO: 6155 - DNA, 17 bp, Homo sapiens
aacacacacaggagaga

SEQ ID NO: 6156 - DNA, 17 bp, Homo sapiens
acacacacaggagagaa

SEQ ID NO: 6157 - DNA, 17 bp, Homo sapiens
cacacacaggagagaag

SEQ ID NO: 6158 - DNA, 17 bp, Homo sapiens
acacacaggagagaagc

SEQ ID NO: 6159 - DNA, 17 bp, Homo sapiens
cacacaggagagaagcc

SEQ ID NO: 6160 - DNA, 17 bp, Homo sapiens
acacaggagagaagccc

SEQ ID NO: 6161 - DNA, 17 bp, Homo sapiens
cacaggagagaagccct

SEQ ID NO: 6162 - DNA, 17 bp, Homo sapiens
acaggagagaagcccta

SEQ ID NO: 6163 - DNA, 17 bp, Homo sapiens
caggagagaagccctac

SEQ ID NO: 6164 - DNA, 17 bp, Homo sapiens
aggagagaagccctacc

SEQ ID NO: 6165 - DNA, 17 bp, Homo sapiens
ggagagaagccctacca

SEQ ID NO: 6166 - DNA, 17 bp, Homo sapiens
gagagaagccctaccaa

SEQ ID NO: 6167 - DNA, 17 bp, Homo sapiens
agagaagccctaccaat

SEQ ID NO: 6168 - DNA, 17 bp, Homo sapiens
gagaagccctaccaatg

SEQ ID NO: 6169 - DNA, 17 bp, Homo sapiens
agaagccctaccaatgc

SEQ ID NO: 6170 - DNA, 17 bp, Homo sapiens
gaagccctaccaatgca

SEQ ID NO: 6171 - DNA, 17 bp, Homo sapiens
aagccctaccaatgcaa

SEQ ID NO: 6172 - DNA, 17 bp, Homo sapiens
agccctaccaatgcaag

SEQ ID NO: 6173 - DNA, 17 bp, Homo sapiens
gccctaccaatgcaagg

SEQ ID NO: 6174 - DNA, 17 bp, Homo sapiens
ccctaccaatgcaaggg

SEQ ID NO: 6175 - DNA, 17 bp, Homo sapiens
cctaccaatgcaagggg

SEQ ID NO: 6176 - DNA, 17 bp, Homo sapiens
ctaccaatgcaaggggt

SEQ ID NO: 6177 - DNA, 17 bp, Homo sapiens
taccaatgcaaggggtg

SEQ ID NO: 6178 - DNA, 17 bp, Homo sapiens
accaatgcaaggggtgt

SEQ ID NO: 6179 - DNA, 17 bp, Homo sapiens
ccaatgcaaggggtgtg

SEQ ID NO: 6180 - DNA, 17 bp, Homo sapiens
caatgcaaggggtgtga

SEQ ID NO: 6181 - DNA, 17 bp, Homo sapiens
aatgcaaggggtgtgag

SEQ ID NO: 6182 - DNA, 17 bp, Homo sapiens
atgcaaggggtgtgaga

SEQ ID NO: 6183 - DNA, 17 bp, Homo sapiens
tgcaaggggtgtgagaa

SEQ ID NO: 6184 - DNA, 17 bp, Homo sapiens
gcaaggggtgtgagaag

SEQ ID NO: 6185 - DNA, 17 bp, Homo sapiens
caaggggtgtgagaaga

SEQ ID NO: 6186 - DNA, 17 bp, Homo sapiens
aaggggtgtgagaagaa

SEQ ID NO: 6187 - DNA, 17 bp, Homo sapiens
aggggtgtgagaagaaa

SEQ ID NO: 6188 - DNA, 17 bp, Homo sapiens
ggggtgtgagaagaaat

SEQ ID NO: 6189 - DNA, 17 bp, Homo sapiens
gggtgtgagaagaaatt

SEQ ID NO: 6190 - DNA, 17 bp, Homo sapiens
ggtgtgagaagaaattc

SEQ ID NO: 6191 - DNA, 17 bp, Homo sapiens
gtgtgagaagaaattca

SEQ ID NO: 6192 - DNA, 17 bp, Homo sapiens
tgtgagaagaaattcag

SEQ ID NO: 6193 - DNA, 17 bp, Homo sapiens
gtgagaagaaattcagc

SEQ ID NO: 6194 - DNA, 17 bp, Homo sapiens
tgagaagaaattcagcg

SEQ ID NO: 6195 - DNA, 17 bp, Homo sapiens
gagaagaaattcagcga

SEQ ID NO: 6196 - DNA, 17 bp, Homo sapiens
agaagaaattcagcgac

SEQ ID NO: 6197 - DNA, 17 bp, Homo sapiens
gaagaaattcagcgaca

SEQ ID NO: 6198 - DNA, 17 bp, Homo sapiens
aagaaattcagcgacag

SEQ ID NO: 6199 - DNA, 17 bp, Homo sapiens
agaaattcagcgacagc

SEQ ID NO: 6200 - DNA, 17 bp, Homo sapiens
gaaattcagcgacagct

SEQ ID NO: 6201 - DNA, 17 bp, Homo sapiens
aaattcagcgacagctc

SEQ ID NO: 6202 - DNA, 17 bp, Homo sapiens
aattcagcgacagctca

SEQ ID NO: 6203 - DNA, 17 bp, Homo sapiens
attcagcgacagctcaa

SEQ ID NO: 6204 - DNA, 17 bp, Homo sapiens
ttcagcgacagctcaac

SEQ ID NO: 6205 - DNA, 17 bp, Homo sapiens
tcagcgacagctcaaca

SEQ ID NO: 6206 - DNA, 17 bp, Homo sapiens
cagcgacagctcaacac

SEQ ID NO: 6207 - DNA, 17 bp, Homo sapiens
agcgacagctcaacact

SEQ ID NO: 6208 - DNA, 17 bp, Homo sapiens
gcgacagctcaacactc

SEQ ID NO: 6209 - DNA, 17 bp, Homo sapiens
cgacagctcaacactca

SEQ ID NO: 6210 - DNA, 17 bp, Homo sapiens
gacagctcaacactcat

SEQ ID NO: 6211 - DNA, 17 bp, Homo sapiens
acagctcaacactcatc

SEQ ID NO: 6212 - DNA, 17 bp, Homo sapiens
cagctcaacactcatca

SEQ ID NO: 6213 - DNA, 17 bp, Homo sapiens
agctcaacactcatcaa

SEQ ID NO: 6214 - DNA, 17 bp, Homo sapiens
gctcaacactcatcaaa

SEQ ID NO: 6215 - DNA, 17 bp, Homo sapiens
ctcaacactcatcaaac

SEQ ID NO: 6216 - DNA, 17 bp, Homo sapiens
tcaacactcatcaaaca

SEQ ID NO: 6217 - DNA, 17 bp, Homo sapiens
caacactcatcaaacat

SEQ ID NO: 6218 - DNA, 17 bp, Homo sapiens
aacactcatcaaacatc

SEQ ID NO: 6219 - DNA, 17 bp, Homo sapiens
acactcatcaaacatca

SEQ ID NO: 6220 - DNA, 17 bp, Homo sapiens
cactcatcaaacatcag

SEQ ID NO: 6221 - DNA, 17 bp, Homo sapiens
actcatcaaacatcaga

SEQ ID NO: 6222 - DNA, 17 bp, Homo sapiens
ctcatcaaacatcagag

SEQ ID NO: 6223 - DNA, 17 bp, Homo sapiens
tcatcaaacatcagaga

SEQ ID NO: 6224 - DNA, 17 bp, Homo sapiens
catcaaacatcagagaa

SEQ ID NO: 6225 - DNA, 17 bp, Homo sapiens
atcaaacatcagagaac

SEQ ID NO: 6226 - DNA, 17 bp, Homo sapiens
tcaaacatcagagaacc

SEQ ID NO: 6227 - DNA, 17 bp, Homo sapiens
caaacatcagagaaccc

SEQ ID NO: 6228 - DNA, 17 bp, Homo sapiens
aaacatcagagaaccca

SEQ ID NO: 6229 - DNA, 17 bp, Homo sapiens
aacatcagagaacccac

SEQ ID NO: 6230 - DNA, 17 bp, Homo sapiens
acatcagagaacccaca

SEQ ID NO: 6231 - DNA, 17 bp, Homo sapiens
catcagagaacccacac

SEQ ID NO: 6232 - DNA, 17 bp, Homo sapiens
atcagagaacccacaca

SEQ ID NO: 6233 - DNA, 17 bp, Homo sapiens
tcagagaacccacacag

SEQ ID NO: 6234 - DNA, 17 bp, Homo sapiens
cagagaacccacacagg

SEQ ID NO: 6235 - DNA, 17 bp, Homo sapiens
agagaacccacacaggg

SEQ ID NO: 6236 - DNA, 17 bp, Homo sapiens
gagaacccacacagggg

SEQ ID NO: 6237 - DNA, 17 bp, Homo sapiens
agaacccacacagggga

SEQ ID NO: 6238 - DNA, 17 bp, Homo sapiens
gaacccacacaggggag

SEQ ID NO: 6239 - DNA, 17 bp, Homo sapiens
aacccacacaggggaga

SEQ ID NO: 6240 - DNA, 17 bp, Homo sapiens
acccacacaggggagag

SEQ ID NO: 6241 - DNA, 17 bp, Homo sapiens
cccacacaggggagaga

SEQ ID NO: 6242 - DNA, 17 bp, Homo sapiens
ccacacaggggagagac

SEQ ID NO: 6243 - DNA, 17 bp, Homo sapiens
cacacaggggagagacc

SEQ ID NO: 6244 - DNA, 17 bp, Homo sapiens
acacaggggagagaccc

SEQ ID NO: 6245 - DNA, 17 bp, Homo sapiens
cacaggggagagaccct

SEQ ID NO: 6246 - DNA, 17 bp, Homo sapiens
acaggggagagacccta

SEQ ID NO: 6247 - DNA, 17 bp, Homo sapiens
caggggagagaccctat

SEQ ID NO: 6248 - DNA, 17 bp, Homo sapiens
aggggagagaccctatg

SEQ ID NO: 6249 - DNA, 17 bp, Homo sapiens
ggggagagaccctatga

SEQ ID NO: 6250 - DNA, 17 bp, Homo sapiens
gggagagaccctatgag

SEQ ID NO: 6251 - DNA, 17 bp, Homo sapiens
ggagagaccctatgagt

SEQ ID NO: 6252 - DNA, 17 bp, Homo sapiens
gagagaccctatgagtg

SEQ ID NO: 6253 - DNA, 17 bp, Homo sapiens
agagaccctatgagtgc

SEQ ID NO: 6254 - DNA, 17 bp, Homo sapiens
gagaccctatgagtgcc

SEQ ID NO: 6255 - DNA, 17 bp, Homo sapiens
agaccctatgagtgccc

SEQ ID NO: 6256 - DNA, 17 bp, Homo sapiens
gaccctatgagtgccca

SEQ ID NO: 6257 - DNA, 17 bp, Homo sapiens
accctatgagtgcccag

SEQ ID NO: 6258 - DNA, 17 bp, Homo sapiens
ccctatgagtgcccaga

SEQ ID NO: 6259 - DNA, 17 bp, Homo sapiens
cctatgagtgcccagag

SEQ ID NO: 6260 - DNA, 17 bp, Homo sapiens
ctatgagtgcccagagt

SEQ ID NO: 6261 - DNA, 17 bp, Homo sapiens
tatgagtgcccagagtg

SEQ ID NO: 6262 - DNA, 17 bp, Homo sapiens
atgagtgcccagagtgt

SEQ ID NO: 6263 - DNA, 17 bp, Homo sapiens
tgagtgcccagagtgtg

SEQ ID NO: 6264 - DNA, 17 bp, Homo sapiens
gagtgcccagagtgtgg

SEQ ID NO: 6265 - DNA, 17 bp, Homo sapiens
agtgcccagagtgtgga

SEQ ID NO: 6266 - DNA, 17 bp, Homo sapiens
gtgcccagagtgtggaa

SEQ ID NO: 6267 - DNA, 17 bp, Homo sapiens
tgcccagagtgtggaaa

SEQ ID NO: 6268 - DNA, 17 bp, Homo sapiens
gcccagagtgtggaaag

SEQ ID NO: 6269 - DNA, 17 bp, Homo sapiens
cccagagtgtggaaaga

SEQ ID NO: 6270 - DNA, 17 bp, Homo sapiens
ccagagtgtggaaagac

SEQ ID NO: 6271 - DNA, 17 bp, Homo sapiens
cagagtgtggaaagact

SEQ ID NO: 6272 - DNA, 17 bp, Homo sapiens
agagtgtggaaagactt

SEQ ID NO: 6273 - DNA, 17 bp, Homo sapiens
gagtgtggaaagacttt

SEQ ID NO: 6274 - DNA, 17 bp, Homo sapiens
agtgtggaaagactttt

SEQ ID NO: 6275 - DNA, 17 bp, Homo sapiens
gtgtggaaagacttttg

SEQ ID NO: 6276 - DNA, 17 bp, Homo sapiens
tgtggaaagacttttgg

SEQ ID NO: 6277 - DNA, 17 bp, Homo sapiens
gtggaaagacttttggg

SEQ ID NO: 6278 - DNA, 17 bp, Homo sapiens
tggaaagacttttgggc

SEQ ID NO: 6279 - DNA, 17 bp, Homo sapiens
ggaaagacttttgggcg

SEQ ID NO: 6280 - DNA, 17 bp, Homo sapiens
gaaagacttttgggcgg

SEQ ID NO: 6281 - DNA, 17 bp, Homo sapiens
aaagacttttgggcgga

SEQ ID NO: 6282 - DNA, 17 bp, Homo sapiens
aagacttttgggcggaa

SEQ ID NO: 6283 - DNA, 17 bp, Homo sapiens
agacttttgggcggaag

SEQ ID NO: 6284 - DNA, 17 bp, Homo sapiens
gacttttgggcggaagc

SEQ ID NO: 6285 - DNA, 17 bp, Homo sapiens
acttttgggcggaagcc

SEQ ID NO: 6286 - DNA, 17 bp, Homo sapiens
cttttgggcggaagcca

SEQ ID NO: 6287 - DNA, 17 bp, Homo sapiens
ttttgggcggaagccac

SEQ ID NO: 6288 - DNA, 17 bp, Homo sapiens
tttgggcggaagccaca

SEQ ID NO: 6289 - DNA, 17 bp, Homo sapiens
ttgggcggaagccacac

SEQ ID NO: 6290 - DNA, 17 bp, Homo sapiens
tgggcggaagccacacc

SEQ ID NO: 6291 - DNA, 17 bp, Homo sapiens
gggcggaagccacacct

SEQ ID NO: 6292 - DNA, 17 bp, Homo sapiens
ggcggaagccacacctc

SEQ ID NO: 6293 - DNA, 17 bp, Homo sapiens
gcggaagccacacctca

SEQ ID NO: 6294 - DNA, 17 bp, Homo sapiens
cggaagccacacctcat

SEQ ID NO: 6295 - DNA, 17 bp, Homo sapiens
ggaagccacacctcata

SEQ ID NO: 6296 - DNA, 17 bp, Homo sapiens
gaagccacacctcataa

SEQ ID NO: 6297 - DNA, 17 bp, Homo sapiens
aagccacacctcataat

SEQ ID NO: 6298 - DNA, 17 bp, Homo sapiens
agccacacctcataatg

SEQ ID NO: 6299 - DNA, 17 bp, Homo sapiens
gccacacctcataatgc

SEQ ID NO: 6300 - DNA, 17 bp, Homo sapiens
ccacacctcataatgca

SEQ ID NO: 6301 - DNA, 17 bp, Homo sapiens
cacacctcataatgcac

SEQ ID NO: 6302 - DNA, 17 bp, Homo sapiens
acacctcataatgcacc

SEQ ID NO: 6303 - DNA, 17 bp, Homo sapiens
cacctcataatgcacca

SEQ ID NO: 6304 - DNA, 17 bp, Homo sapiens
acctcataatgcaccaa

SEQ ID NO: 6305 - DNA, 17 bp, Homo sapiens
cctcataatgcaccaaa

SEQ ID NO: 6306 - DNA, 17 bp, Homo sapiens
ctcataatgcaccaaag

SEQ ID NO: 6307 - DNA, 17 bp, Homo sapiens
tcataatgcaccaaaga

SEQ ID NO: 6308 - DNA, 17 bp, Homo sapiens
cataatgcaccaaagaa

SEQ ID NO: 6309 - DNA, 17 bp, Homo sapiens
ataatgcaccaaagaac

SEQ ID NO: 6310 - DNA, 17 bp, Homo sapiens
taatgcaccaaagaacc

SEQ ID NO: 6311 - DNA, 17 bp, Homo sapiens
aatgcaccaaagaaccc

SEQ ID NO: 6312 - DNA, 17 bp, Homo sapiens
atgcaccaaagaaccca

SEQ ID NO: 6313 - DNA, 17 bp, Homo sapiens
tgcaccaaagaacccac

SEQ ID NO: 6314 - DNA, 17 bp, Homo sapiens
gcaccaaagaacccaca

SEQ ID NO: 6315 - DNA, 17 bp, Homo sapiens
caccaaagaacccacac

SEQ ID NO: 6316 - DNA, 17 bp, Homo sapiens
accaaagaacccacaca

SEQ ID NO: 6317 - DNA, 17 bp, Homo sapiens
ccaaagaacccacacag

SEQ ID NO: 6318 - DNA, 17 bp, Homo sapiens
caaagaacccacacagg

SEQ ID NO: 6319 - DNA, 17 bp, Homo sapiens
aaagaacccacacaggc

SEQ ID NO: 6320 - DNA, 17 bp, Homo sapiens
aagaacccacacaggcg

SEQ ID NO: 6321 - DNA, 17 bp, Homo sapiens
agaacccacacaggcga

SEQ ID NO: 6322 - DNA, 17 bp, Homo sapiens
gaacccacacaggcgag

SEQ ID NO: 6323 - DNA, 17 bp, Homo sapiens
aacccacacaggcgaga

SEQ ID NO: 6324 - DNA, 17 bp, Homo sapiens
acccacacaggcgagaa

SEQ ID NO: 6325 - DNA, 17 bp, Homo sapiens
cccacacaggcgagaag

SEQ ID NO: 6326 - DNA, 17 bp, Homo sapiens
ccacacaggcgagaagc

SEQ ID NO: 6327 - DNA, 17 bp, Homo sapiens
cacacaggcgagaagcc

SEQ ID NO: 6328 - DNA, 17 bp, Homo sapiens
acacaggcgagaagccc

SEQ ID NO: 6329 - DNA, 17 bp, Homo sapiens
cacaggcgagaagccct

SEQ ID NO: 6330 - DNA, 17 bp, Homo sapiens
acaggcgagaagcccta

SEQ ID NO: 6331 - DNA, 17 bp, Homo sapiens
caggcgagaagccctac

SEQ ID NO: 6332 - DNA, 17 bp, Homo sapiens
aggcgagaagccctacg

SEQ ID NO: 6333 - DNA, 17 bp, Homo sapiens
ggcgagaagccctacgc

SEQ ID NO: 6334 - DNA, 17 bp, Homo sapiens
gcgagaagccctacgcg

SEQ ID NO: 6335 - DNA, 17 bp, Homo sapiens
cgagaagccctacgcgt

SEQ ID NO: 6336 - DNA, 17 bp, Homo sapiens
gagaagccctacgcgtg

SEQ ID NO: 6337 - DNA, 17 bp, Homo sapiens
agaagccctacgcgtgc

SEQ ID NO: 6338 - DNA, 17 bp, Homo sapiens
gaagccctacgcgtgcc

SEQ ID NO: 6339 - DNA, 17 bp, Homo sapiens
aagccctacgcgtgcct

SEQ ID NO: 6340 - DNA, 17 bp, Homo sapiens
agccctacgcgtgcctg

SEQ ID NO: 6341 - DNA, 17 bp, Homo sapiens
gccctacgcgtgcctgg

SEQ ID NO: 6342 - DNA, 17 bp, Homo sapiens
ccctacgcgtgcctgga

SEQ ID NO: 6343 - DNA, 17 bp, Homo sapiens
cctacgcgtgcctggaa

SEQ ID NO: 6344 - DNA, 17 bp, Homo sapiens
ctacgcgtgcctggaat

SEQ ID NO: 6345 - DNA, 17 bp, Homo sapiens
tacgcgtgcctggaatg

SEQ ID NO: 6346 - DNA, 17 bp, Homo sapiens
acgcgtgcctggaatgt

SEQ ID NO: 6347 - DNA, 17 bp, Homo sapiens
cgcgtgcctggaatgtc

SEQ ID NO: 6348 - DNA, 17 bp, Homo sapiens
gcgtgcctggaatgtca

SEQ ID NO: 6349 - DNA, 17 bp, Homo sapiens
cgtgcctggaatgtcac

SEQ ID NO: 6350 - DNA, 17 bp, Homo sapiens
gtgcctggaatgtcaca

SEQ ID NO: 6351 - DNA, 17 bp, Homo sapiens
tgcctggaatgtcacaa

SEQ ID NO: 6352 - DNA, 17 bp, Homo sapiens
gcctggaatgtcacaaa

SEQ ID NO: 6353 - DNA, 17 bp, Homo sapiens
cctggaatgtcacaaaa

SEQ ID NO: 6354 - DNA, 17 bp, Homo sapiens
ctggaatgtcacaaaag

SEQ ID NO: 6355 - DNA, 17 bp, Homo sapiens
tggaatgtcacaaaagc

SEQ ID NO: 6356 - DNA, 17 bp, Homo sapiens
ggaatgtcacaaaagct

SEQ ID NO: 6357 - DNA, 17 bp, Homo sapiens
gaatgtcacaaaagctt

SEQ ID NO: 6358 - DNA, 17 bp, Homo sapiens
aatgtcacaaaagcttc

SEQ ID NO: 6359 - DNA, 17 bp, Homo sapiens
atgtcacaaaagcttca

SEQ ID NO: 6360 - DNA, 17 bp, Homo sapiens
tgtcacaaaagcttcag

SEQ ID NO: 6361 - DNA, 17 bp, Homo sapiens
gtcacaaaagcttcagt

SEQ ID NO: 6362 - DNA, 17 bp, Homo sapiens
tcacaaaagcttcagtc

SEQ ID NO: 6363 - DNA, 17 bp, Homo sapiens
cacaaaagcttcagtcg

SEQ ID NO: 6364 - DNA, 17 bp, Homo sapiens
acaaaagcttcagtcga

SEQ ID NO: 6365 - DNA, 25 bp, Homo sapiens
gtggcaaagctcaatcaggacaatt

SEQ ID NO: 6366 - DNA, 25 bp, Homo sapiens
tggcaaagctcaatcaggacaattc

SEQ ID NO: 6367 - DNA, 25 bp, Homo sapiens
ggcaaagctcaatcaggacaattct

SEQ ID NO: 6368 - DNA, 25 bp, Homo sapiens
gcaaagctcaatcaggacaattctg

SEQ ID NO: 6369 - DNA, 25 bp, Homo sapiens
caaagctcaatcaggacaattctga

SEQ ID NO: 6370 - DNA, 25 bp, Homo sapiens
aaagctcaatcaggacaattctgaa

SEQ ID NO: 6371 - DNA, 25 bp, Homo sapiens
aagctcaatcaggacaattctgaaa

SEQ ID NO: 6372 - DNA, 25 bp, Homo sapiens
agctcaatcaggacaattctgaaac

SEQ ID NO: 6373 - DNA, 25 bp, Homo sapiens
gctcaatcaggacaattctgaaaca

SEQ ID NO: 6374 - DNA, 25 bp, Homo sapiens
ctcaatcaggacaattctgaaacag

SEQ ID NO: 6375 - DNA, 25 bp, Homo sapiens
tcaatcaggacaattctgaaacagc

SEQ ID NO: 6376 - DNA, 25 bp, Homo sapiens
caatcaggacaattctgaaacagca

SEQ ID NO: 6377 - DNA, 25 bp, Homo sapiens
aatcaggacaattctgaaacagcag

SEQ ID NO: 6378 - DNA, 25 bp, Homo sapiens
atcaggacaattctgaaacagcaga

SEQ ID NO: 6379 - DNA, 25 bp, Homo sapiens
tcaggacaattctgaaacagcagaa

SEQ ID NO: 6380 - DNA, 25 bp, Homo sapiens
caggacaattctgaaacagcagaac

SEQ ID NO: 6381 - DNA, 25 bp, Homo sapiens
aggacaattctgaaacagcagaaca

SEQ ID NO: 6382 - DNA, 25 bp, Homo sapiens
ggacaattctgaaacagcagaacaa

SEQ ID NO: 6383 - DNA, 25 bp, Homo sapiens
gacaattctgaaacagcagaacaat

SEQ ID NO: 6384 - DNA, 25 bp, Homo sapiens
acaattctgaaacagcagaacaatg

SEQ ID NO: 6385 - DNA, 25 bp, Homo sapiens
caattctgaaacagcagaacaatgt

SEQ ID NO: 6386 - DNA, 25 bp, Homo sapiens
aattctgaaacagcagaacaatgtg

SEQ ID NO: 6387 - DNA, 25 bp, Homo sapiens
attctgaaacagcagaacaatgtgg

SEQ ID NO: 6388 - DNA, 25 bp, Homo sapiens
ttctgaaacagcagaacaatgtgga

SEQ ID NO: 6389 - DNA, 25 bp, Homo sapiens
tctgaaacagcagaacaatgtggaa

SEQ ID NO: 6390 - DNA, 25 bp, Homo sapiens
ctgaaacagcagaacaatgtggaac

SEQ ID NO: 6391 - DNA, 25 bp, Homo sapiens
tgaaacagcagaacaatgtggaaca

SEQ ID NO: 6392 - DNA, 25 bp, Homo sapiens
gaaacagcagaacaatgtggaacat

SEQ ID NO: 6393 - DNA, 25 bp, Homo sapiens
aaacagcagaacaatgtggaacatc

SEQ ID NO: 6394 - DNA, 25 bp, Homo sapiens
aacagcagaacaatgtggaacatcc

SEQ ID NO: 6395 - DNA, 25 bp, Homo sapiens
acagcagaacaatgtggaacatcct

SEQ ID NO: 6396 - DNA, 25 bp, Homo sapiens
cagcagaacaatgtggaacatcctc

SEQ ID NO: 6397 - DNA, 25 bp, Homo sapiens
agcagaacaatgtggaacatcctca

SEQ ID NO: 6398 - DNA, 25 bp, Homo sapiens
gcagaacaatgtggaacatcctcag

SEQ ID NO: 6399 - DNA, 25 bp, Homo sapiens
cagaacaatgtggaacatcctcaga

SEQ ID NO: 6400 - DNA, 25 bp, Homo sapiens
agaacaatgtggaacatcctcagaa

SEQ ID NO: 6401 - DNA, 25 bp, Homo sapiens
gaacaatgtggaacatcctcagaaa

SEQ ID NO: 6402 - DNA, 25 bp, Homo sapiens
aacaatgtggaacatcctcagaaag

SEQ ID NO: 6403 - DNA, 25 bp, Homo sapiens
acaatgtggaacatcctcagaaagg

SEQ ID NO: 6404 - DNA, 25 bp, Homo sapiens
caatgtggaacatcctcagaaagga

SEQ ID NO: 6405 - DNA, 25 bp, Homo sapiens
aatgtggaacatcctcagaaaggac

SEQ ID NO: 6406 - DNA, 25 bp, Homo sapiens
atgtggaacatcctcagaaaggacc

SEQ ID NO: 6407 - DNA, 25 bp, Homo sapiens
tgtggaacatcctcagaaaggacca

SEQ ID NO: 6408 - DNA, 25 bp, Homo sapiens
gtggaacatcctcagaaaggaccaa

SEQ ID NO: 6409 - DNA, 25 bp, Homo sapiens
tggaacatcctcagaaaggaccaat

SEQ ID NO: 6410 - DNA, 25 bp, Homo sapiens
ggaacatcctcagaaaggaccaata

SEQ ID NO: 6411 - DNA, 25 bp, Homo sapiens
gaacatcctcagaaaggaccaataa

SEQ ID NO: 6412 - DNA, 25 bp, Homo sapiens
aacatcctcagaaaggaccaataaa

SEQ ID NO: 6413 - DNA, 25 bp, Homo sapiens
acatcctcagaaaggaccaataaag

SEQ ID NO: 6414 - DNA, 25 bp, Homo sapiens
catcctcagaaaggaccaataaaga

SEQ ID NO: 6415 - DNA, 25 bp, Homo sapiens
atcctcagaaaggaccaataaagat

SEQ ID NO: 6416 - DNA, 25 bp, Homo sapiens
tcctcagaaaggaccaataaagatc

SEQ ID NO: 6417 - DNA, 25 bp, Homo sapiens
cctcagaaaggaccaataaagatct

SEQ ID NO: 6418 - DNA, 25 bp, Homo sapiens
ctcagaaaggaccaataaagatctt

SEQ ID NO: 6419 - DNA, 25 bp, Homo sapiens
tcagaaaggaccaataaagatcttt

SEQ ID NO: 6420 - DNA, 25 bp, Homo sapiens
cagaaaggaccaataaagatctttc

SEQ ID NO: 6421 - DNA, 25 bp, Homo sapiens
agaaaggaccaataaagatctttct

SEQ ID NO: 6422 - DNA, 25 bp, Homo sapiens
gaaaggaccaataaagatctttctc

SEQ ID NO: 6423 - DNA, 25 bp, Homo sapiens
aaaggaccaataaagatctttctca

SEQ ID NO: 6424 - DNA, 25 bp, Homo sapiens
aaggaccaataaagatctttctcat

SEQ ID NO: 6425 - DNA, 25 bp, Homo sapiens
aggaccaataaagatctttctcata

SEQ ID NO: 6426 - DNA, 25 bp, Homo sapiens
ggaccaataaagatctttctcatac

SEQ ID NO: 6427 - DNA, 25 bp, Homo sapiens
gaccaataaagatctttctcatact

SEQ ID NO: 6428 - DNA, 25 bp, Homo sapiens
accaataaagatctttctcatactc

SEQ ID NO: 6429 - DNA, 25 bp, Homo sapiens
ccaataaagatctttctcatactct

SEQ ID NO: 6430 - DNA, 25 bp, Homo sapiens
caataaagatctttctcatactctt

SEQ ID NO: 6431 - DNA, 25 bp, Homo sapiens
aataaagatctttctcatactctta

SEQ ID NO: 6432 - DNA, 25 bp, Homo sapiens
ataaagatctttctcatactcttag

SEQ ID NO: 6433 - DNA, 25 bp, Homo sapiens
taaagatctttctcatactcttagt

SEQ ID NO: 6434 - DNA, 25 bp, Homo sapiens
aaagatctttctcatactcttagtt

SEQ ID NO: 6435 - DNA, 25 bp, Homo sapiens
aagatctttctcatactcttagttg

SEQ ID NO: 6436 - DNA, 25 bp, Homo sapiens
agatctttctcatactcttagttgg

SEQ ID NO: 6437 - DNA, 25 bp, Homo sapiens
gatctttctcatactcttagttggg

SEQ ID NO: 6438 - DNA, 25 bp, Homo sapiens
atctttctcatactcttagttgggg

SEQ ID NO: 6439 - DNA, 25 bp, Homo sapiens
tctttctcatactcttagttgggga

SEQ ID NO: 6440 - DNA, 25 bp, Homo sapiens
ctttctcatactcttagttggggag

SEQ ID NO: 6441 - DNA, 25 bp, Homo sapiens
tttctcatactcttagttggggagg

SEQ ID NO: 6442 - DNA, 25 bp, Homo sapiens
ttctcatactcttagttggggagga

SEQ ID NO: 6443 - DNA, 25 bp, Homo sapiens
tctcatactcttagttggggaggaa

SEQ ID NO: 6444 - DNA, 25 bp, Homo sapiens
ctcatactcttagttggggaggaaa

SEQ ID NO: 6445 - DNA, 25 bp, Homo sapiens
tcatactcttagttggggaggaaac

SEQ ID NO: 6446 - DNA, 25 bp, Homo sapiens
catactcttagttggggaggaaact

SEQ ID NO: 6447 - DNA, 25 bp, Homo sapiens
atactcttagttggggaggaaactg

SEQ ID NO: 6448 - DNA, 25 bp, Homo sapiens
tactcttagttggggaggaaactgg

SEQ ID NO: 6449 - DNA, 25 bp, Homo sapiens
actcttagttggggaggaaactggg

SEQ ID NO: 6450 - DNA, 25 bp, Homo sapiens
ctcttagttggggaggaaactggga

SEQ ID NO: 6451 - DNA, 25 bp, Homo sapiens
tcttagttggggaggaaactgggag

SEQ ID NO: 6452 - DNA, 25 bp, Homo sapiens
cttagttggggaggaaactgggagc

SEQ ID NO: 6453 - DNA, 25 bp, Homo sapiens
ttagttggggaggaaactgggagca

SEQ ID NO: 6454 - DNA, 25 bp, Homo sapiens
tagttggggaggaaactgggagcaa

SEQ ID NO: 6455 - DNA, 25 bp, Homo sapiens
agttggggaggaaactgggagcaag

SEQ ID NO: 6456 - DNA, 25 bp, Homo sapiens
gttggggaggaaactgggagcaagg

SEQ ID NO: 6457 - DNA, 25 bp, Homo sapiens
ttggggaggaaactgggagcaaggc

SEQ ID NO: 6458 - DNA, 25 bp, Homo sapiens
tggggaggaaactgggagcaaggcc

SEQ ID NO: 6459 - DNA, 25 bp, Homo sapiens
ggggaggaaactgggagcaaggcct

SEQ ID NO: 6460 - DNA, 25 bp, Homo sapiens
gggaggaaactgggagcaaggccta

SEQ ID NO: 6461 - DNA, 25 bp, Homo sapiens
ggaggaaactgggagcaaggcctag

SEQ ID NO: 6462 - DNA, 25 bp, Homo sapiens
gaggaaactgggagcaaggcctaga

SEQ ID NO: 6463 - DNA, 25 bp, Homo sapiens
aggaaactgggagcaaggcctagaa

SEQ ID NO: 6464 - DNA, 25 bp, Homo sapiens
ggaaactgggagcaaggcctagaat

SEQ ID NO: 6465 - DNA, 25 bp, Homo sapiens
gaaactgggagcaaggcctagaatt

SEQ ID NO: 6466 - DNA, 25 bp, Homo sapiens
aaactgggagcaaggcctagaatta

SEQ ID NO: 6467 - DNA, 25 bp, Homo sapiens
aactgggagcaaggcctagaattag

SEQ ID NO: 6468 - DNA, 25 bp, Homo sapiens
actgggagcaaggcctagaattaga

SEQ ID NO: 6469 - DNA, 25 bp, Homo sapiens
ctgggagcaaggcctagaattagaa

SEQ ID NO: 6470 - DNA, 25 bp, Homo sapiens
tgggagcaaggcctagaattagaag

SEQ ID NO: 6471 - DNA, 25 bp, Homo sapiens
gggagcaaggcctagaattagaagg

SEQ ID NO: 6472 - DNA, 25 bp, Homo sapiens
ggagcaaggcctagaattagaaggg

SEQ ID NO: 6473 - DNA, 25 bp, Homo sapiens
gagcaaggcctagaattagaagggc

SEQ ID NO: 6474 - DNA, 25 bp, Homo sapiens
agcaaggcctagaattagaagggca

SEQ ID NO: 6475 - DNA, 25 bp, Homo sapiens
gcaaggcctagaattagaagggcaa

SEQ ID NO: 6476 - DNA, 25 bp, Homo sapiens
caaggcctagaattagaagggcaac

SEQ ID NO: 6477 - DNA, 25 bp, Homo sapiens
aaggcctagaattagaagggcaaca

SEQ ID NO: 6478 - DNA, 25 bp, Homo sapiens
aggcctagaattagaagggcaacat

SEQ ID NO: 6479 - DNA, 25 bp, Homo sapiens
ggcctagaattagaagggcaacatg

SEQ ID NO: 6480 - DNA, 25 bp, Homo sapiens
gcctagaattagaagggcaacatgg

SEQ ID NO: 6481 - DNA, 25 bp, Homo sapiens
cctagaattagaagggcaacatgga

SEQ ID NO: 6482 - DNA, 25 bp, Homo sapiens
ctagaattagaagggcaacatggaa

SEQ ID NO: 6483 - DNA, 25 bp, Homo sapiens
tagaattagaagggcaacatggaac

SEQ ID NO: 6484 - DNA, 25 bp, Homo sapiens
agaattagaagggcaacatggaacc

SEQ ID NO: 6485 - DNA, 25 bp, Homo sapiens
gaattagaagggcaacatggaaccc

SEQ ID NO: 6486 - DNA, 25 bp, Homo sapiens
aattagaagggcaacatggaaccct

SEQ ID NO: 6487 - DNA, 25 bp, Homo sapiens
attagaagggcaacatggaaccctt

SEQ ID NO: 6488 - DNA, 25 bp, Homo sapiens
ttagaagggcaacatggaacccttc

SEQ ID NO: 6489 - DNA, 25 bp, Homo sapiens
tagaagggcaacatggaacccttcc

SEQ ID NO: 6490 - DNA, 25 bp, Homo sapiens
agaagggcaacatggaacccttcca

SEQ ID NO: 6491 - DNA, 25 bp, Homo sapiens
gaagggcaacatggaacccttccag

SEQ ID NO: 6492 - DNA, 25 bp, Homo sapiens
aagggcaacatggaacccttccagg

SEQ ID NO: 6493 - DNA, 25 bp, Homo sapiens
agggcaacatggaacccttccagga

SEQ ID NO: 6494 - DNA, 25 bp, Homo sapiens
gggcaacatggaacccttccaggag

SEQ ID NO: 6495 - DNA, 25 bp, Homo sapiens
ggcaacatggaacccttccaggaga

SEQ ID NO: 6496 - DNA, 25 bp, Homo sapiens
gcaacatggaacccttccaggagag

SEQ ID NO: 6497 - DNA, 25 bp, Homo sapiens
caacatggaacccttccaggagagg

SEQ ID NO: 6498 - DNA, 25 bp, Homo sapiens
aacatggaacccttccaggagaggg

SEQ ID NO: 6499 - DNA, 25 bp, Homo sapiens
acatggaacccttccaggagagggc

SEQ ID NO: 6500 - DNA, 25 bp, Homo sapiens
catggaacccttccaggagagggcc

SEQ ID NO: 6501 - DNA, 25 bp, Homo sapiens
atggaacccttccaggagagggcca

SEQ ID NO: 6502 - DNA, 25 bp, Homo sapiens
tggaacccttccaggagagggccag

SEQ ID NO: 6503 - DNA, 25 bp, Homo sapiens
ggaacccttccaggagagggccagc

SEQ ID NO: 6504 - DNA, 25 bp, Homo sapiens
gaacccttccaggagagggccagct

SEQ ID NO: 6505 - DNA, 25 bp, Homo sapiens
aacccttccaggagagggccagctg

SEQ ID NO: 6506 - DNA, 25 bp, Homo sapiens
acccttccaggagagggccagctgg

SEQ ID NO: 6507 - DNA, 25 bp, Homo sapiens
cccttccaggagagggccagctgga

SEQ ID NO: 6508 - DNA, 25 bp, Homo sapiens
ccttccaggagagggccagctggag

SEQ ID NO: 6509 - DNA, 25 bp, Homo sapiens
cttccaggagagggccagctggagt

SEQ ID NO: 6510 - DNA, 25 bp, Homo sapiens
ttccaggagagggccagctggagtc

SEQ ID NO: 6511 - DNA, 25 bp, Homo sapiens
tccaggagagggccagctggagtcc

SEQ ID NO: 6512 - DNA, 25 bp, Homo sapiens
ccaggagagggccagctggagtcct

SEQ ID NO: 6513 - DNA, 25 bp, Homo sapiens
caggagagggccagctggagtcctt

SEQ ID NO: 6514 - DNA, 25 bp, Homo sapiens
aggagagggccagctggagtccttt

SEQ ID NO: 6515 - DNA, 25 bp, Homo sapiens
ggagagggccagctggagtcctttt

SEQ ID NO: 6516 - DNA, 25 bp, Homo sapiens
gagagggccagctggagtccttttc

SEQ ID NO: 6517 - DNA, 25 bp, Homo sapiens
agagggccagctggagtccttttca

SEQ ID NO: 6518 - DNA, 25 bp, Homo sapiens
gagggccagctggagtccttttcac

SEQ ID NO: 6519 - DNA, 25 bp, Homo sapiens
agggccagctggagtccttttcaca

SEQ ID NO: 6520 - DNA, 25 bp, Homo sapiens
gggccagctggagtccttttcacag

SEQ ID NO: 6521 - DNA, 25 bp, Homo sapiens
ggccagctggagtccttttcacagg

SEQ ID NO: 6522 - DNA, 25 bp, Homo sapiens
gccagctggagtccttttcacagga

SEQ ID NO: 6523 - DNA, 25 bp, Homo sapiens
ccagctggagtccttttcacaggag

SEQ ID NO: 6524 - DNA, 25 bp, Homo sapiens
cagctggagtccttttcacaggaga

SEQ ID NO: 6525 - DNA, 25 bp, Homo sapiens
agctggagtccttttcacaggagag

SEQ ID NO: 6526 - DNA, 25 bp, Homo sapiens
gctggagtccttttcacaggagagg

SEQ ID NO: 6527 - DNA, 25 bp, Homo sapiens
ctggagtccttttcacaggagaggg

SEQ ID NO: 6528 - DNA, 25 bp, Homo sapiens
tggagtccttttcacaggagaggga

SEQ ID NO: 6529 - DNA, 25 bp, Homo sapiens
ggagtccttttcacaggagagggat

SEQ ID NO: 6530 - DNA, 25 bp, Homo sapiens
gagtccttttcacaggagagggatt

SEQ ID NO: 6531 - DNA, 25 bp, Homo sapiens
agtccttttcacaggagagggattt

SEQ ID NO: 6532 - DNA, 25 bp, Homo sapiens
gtccttttcacaggagagggattta

SEQ ID NO: 6533 - DNA, 25 bp, Homo sapiens
tccttttcacaggagagggatttaa

SEQ ID NO: 6534 - DNA, 25 bp, Homo sapiens
ccttttcacaggagagggatttaaa

SEQ ID NO: 6535 - DNA, 25 bp, Homo sapiens
cttttcacaggagagggatttaaac

SEQ ID NO: 6536 - DNA, 25 bp, Homo sapiens
ttttcacaggagagggatttaaaca

SEQ ID NO: 6537 - DNA, 25 bp, Homo sapiens
tttcacaggagagggatttaaacaa

SEQ ID NO: 6538 - DNA, 25 bp, Homo sapiens
ttcacaggagagggatttaaacaag

SEQ ID NO: 6539 - DNA, 25 bp, Homo sapiens
tcacaggagagggatttaaacaagc

SEQ ID NO: 6540 - DNA, 25 bp, Homo sapiens
cacaggagagggatttaaacaagct

SEQ ID NO: 6541 - DNA, 25 bp, Homo sapiens
acaggagagggatttaaacaagctc

SEQ ID NO: 6542 - DNA, 25 bp, Homo sapiens
caggagagggatttaaacaagctcc

SEQ ID NO: 6543 - DNA, 25 bp, Homo sapiens
aggagagggatttaaacaagctcct

SEQ ID NO: 6544 - DNA, 25 bp, Homo sapiens
ggagagggatttaaacaagctcctg

SEQ ID NO: 6545 - DNA, 25 bp, Homo sapiens
gagagggatttaaacaagctcctgg

SEQ ID NO: 6546 - DNA, 25 bp, Homo sapiens
agagggatttaaacaagctcctgga

SEQ ID NO: 6547 - DNA, 25 bp, Homo sapiens
gagggatttaaacaagctcctggat

SEQ ID NO: 6548 - DNA, 25 bp, Homo sapiens
agggatttaaacaagctcctggatg

SEQ ID NO: 6549 - DNA, 25 bp, Homo sapiens
gggatttaaacaagctcctggatgg

SEQ ID NO: 6550 - DNA, 25 bp, Homo sapiens
ggatttaaacaagctcctggatgga

SEQ ID NO: 6551 - DNA, 25 bp, Homo sapiens
gatttaaacaagctcctggatggat

SEQ ID NO: 6552 - DNA, 25 bp, Homo sapiens
atttaaacaagctcctggatggata

SEQ ID NO: 6553 - DNA, 25 bp, Homo sapiens
tttaaacaagctcctggatggatat

SEQ ID NO: 6554 - DNA, 25 bp, Homo sapiens
ttaaacaagctcctggatggatatg

SEQ ID NO: 6555 - DNA, 25 bp, Homo sapiens
taaacaagctcctggatggatatgt

SEQ ID NO: 6556 - DNA, 25 bp, Homo sapiens
aaacaagctcctggatggatatgta

SEQ ID NO: 6557 - DNA, 25 bp, Homo sapiens
aacaagctcctggatggatatgtag

SEQ ID NO: 6558 - DNA, 25 bp, Homo sapiens
acaagctcctggatggatatgtagg

SEQ ID NO: 6559 - DNA, 25 bp, Homo sapiens
caagctcctggatggatatgtagga

SEQ ID NO: 6560 - DNA, 25 bp, Homo sapiens
aagctcctggatggatatgtaggag

SEQ ID NO: 6561 - DNA, 25 bp, Homo sapiens
agctcctggatggatatgtaggaga

SEQ ID NO: 6562 - DNA, 25 bp, Homo sapiens
gctcctggatggatatgtaggagag

SEQ ID NO: 6563 - DNA, 25 bp, Homo sapiens
ctcctggatggatatgtaggagaga

SEQ ID NO: 6564 - DNA, 25 bp, Homo sapiens
tcctggatggatatgtaggagagaa

SEQ ID NO: 6565 - DNA, 25 bp, Homo sapiens
cctggatggatatgtaggagagaag

SEQ ID NO: 6566 - DNA, 25 bp, Homo sapiens
ctggatggatatgtaggagagaagc

SEQ ID NO: 6567 - DNA, 25 bp, Homo sapiens
tggatggatatgtaggagagaagcc

SEQ ID NO: 6568 - DNA, 25 bp, Homo sapiens
ggatggatatgtaggagagaagcct

SEQ ID NO: 6569 - DNA, 25 bp, Homo sapiens
gatggatatgtaggagagaagccta

SEQ ID NO: 6570 - DNA, 25 bp, Homo sapiens
atggatatgtaggagagaagcctat

SEQ ID NO: 6571 - DNA, 25 bp, Homo sapiens
tggatatgtaggagagaagcctatg

SEQ ID NO: 6572 - DNA, 25 bp, Homo sapiens
ggatatgtaggagagaagcctatgt

SEQ ID NO: 6573 - DNA, 25 bp, Homo sapiens
gatatgtaggagagaagcctatgtg

SEQ ID NO: 6574 - DNA, 25 bp, Homo sapiens
atatgtaggagagaagcctatgtgt

SEQ ID NO: 6575 - DNA, 25 bp, Homo sapiens
tatgtaggagagaagcctatgtgtg

SEQ ID NO: 6576 - DNA, 25 bp, Homo sapiens
atgtaggagagaagcctatgtgtgc

SEQ ID NO: 6577 - DNA, 25 bp, Homo sapiens
tgtaggagagaagcctatgtgtgca

SEQ ID NO: 6578 - DNA, 25 bp, Homo sapiens
gtaggagagaagcctatgtgtgcag

SEQ ID NO: 6579 - DNA, 25 bp, Homo sapiens
taggagagaagcctatgtgtgcaga

SEQ ID NO: 6580 - DNA, 25 bp, Homo sapiens
aggagagaagcctatgtgtgcagaa

SEQ ID NO: 6581 - DNA, 25 bp, Homo sapiens
ggagagaagcctatgtgtgcagaat

SEQ ID NO: 6582 - DNA, 25 bp, Homo sapiens
gagagaagcctatgtgtgcagaatg

SEQ ID NO: 6583 - DNA, 25 bp, Homo sapiens
agagaagcctatgtgtgcagaatgc

SEQ ID NO: 6584 - DNA, 25 bp, Homo sapiens
gagaagcctatgtgtgcagaatgcg

SEQ ID NO: 6585 - DNA, 25 bp, Homo sapiens
agaagcctatgtgtgcagaatgcgg

SEQ ID NO: 6586 - DNA, 25 bp, Homo sapiens
gaagcctatgtgtgcagaatgcggg

SEQ ID NO: 6587 - DNA, 25 bp, Homo sapiens
aagcctatgtgtgcagaatgcggga

SEQ ID NO: 6588 - DNA, 25 bp, Homo sapiens
agcctatgtgtgcagaatgcgggaa

SEQ ID NO: 6589 - DNA, 25 bp, Homo sapiens
gcctatgtgtgcagaatgcgggaaa

SEQ ID NO: 6590 - DNA, 25 bp, Homo sapiens
cctatgtgtgcagaatgcgggaaaa

SEQ ID NO: 6591 - DNA, 25 bp, Homo sapiens
ctatgtgtgcagaatgcgggaaaag

SEQ ID NO: 6592 - DNA, 25 bp, Homo sapiens
tatgtgtgcagaatgcgggaaaagc

SEQ ID NO: 6593 - DNA, 25 bp, Homo sapiens
atgtgtgcagaatgcgggaaaagct

SEQ ID NO: 6594 - DNA, 25 bp, Homo sapiens
tgtgtgcagaatgcgggaaaagctt

SEQ ID NO: 6595 - DNA, 25 bp, Homo sapiens
gtgtgcagaatgcgggaaaagcttt

SEQ ID NO: 6596 - DNA, 25 bp, Homo sapiens
tgtgcagaatgcgggaaaagcttta

SEQ ID NO: 6597 - DNA, 25 bp, Homo sapiens
gtgcagaatgcgggaaaagctttaa

SEQ ID NO: 6598 - DNA, 25 bp, Homo sapiens
tgcagaatgcgggaaaagctttaac

SEQ ID NO: 6599 - DNA, 25 bp, Homo sapiens
gcagaatgcgggaaaagctttaacc

SEQ ID NO: 6600 - DNA, 25 bp, Homo sapiens
cagaatgcgggaaaagctttaacca

SEQ ID NO: 6601 - DNA, 25 bp, Homo sapiens
agaatgcgggaaaagctttaaccag

SEQ ID NO: 6602 - DNA, 25 bp, Homo sapiens
gaatgcgggaaaagctttaaccaga

SEQ ID NO: 6603 - DNA, 25 bp, Homo sapiens
aatgcgggaaaagctttaaccagag

SEQ ID NO: 6604 - DNA, 25 bp, Homo sapiens
atgcgggaaaagctttaaccagagt

SEQ ID NO: 6605 - DNA, 25 bp, Homo sapiens
tgcgggaaaagctttaaccagagtt

SEQ ID NO: 6606 - DNA, 25 bp, Homo sapiens
gcgggaaaagctttaaccagagttc

SEQ ID NO: 6607 - DNA, 25 bp, Homo sapiens
cgggaaaagctttaaccagagttcc

SEQ ID NO: 6608 - DNA, 25 bp, Homo sapiens
gggaaaagctttaaccagagttcct

SEQ ID NO: 6609 - DNA, 25 bp, Homo sapiens
ggaaaagctttaaccagagttccta

SEQ ID NO: 6610 - DNA, 25 bp, Homo sapiens
gaaaagctttaaccagagttcctat

SEQ ID NO: 6611 - DNA, 25 bp, Homo sapiens
aaaagctttaaccagagttcctatc

SEQ ID NO: 6612 - DNA, 25 bp, Homo sapiens
aaagctttaaccagagttcctatct

SEQ ID NO: 6613 - DNA, 25 bp, Homo sapiens
aagctttaaccagagttcctatctc

SEQ ID NO: 6614 - DNA, 25 bp, Homo sapiens
agctttaaccagagttcctatctca

SEQ ID NO: 6615 - DNA, 25 bp, Homo sapiens
gctttaaccagagttcctatctcat

SEQ ID NO: 6616 - DNA, 25 bp, Homo sapiens
ctttaaccagagttcctatctcata

SEQ ID NO: 6617 - DNA, 25 bp, Homo sapiens
tttaaccagagttcctatctcataa

SEQ ID NO: 6618 - DNA, 25 bp, Homo sapiens
ttaaccagagttcctatctcataag

SEQ ID NO: 6619 - DNA, 25 bp, Homo sapiens
taaccagagttcctatctcataaga

SEQ ID NO: 6620 - DNA, 25 bp, Homo sapiens
aaccagagttcctatctcataagac

SEQ ID NO: 6621 - DNA, 25 bp, Homo sapiens
accagagttcctatctcataagaca

SEQ ID NO: 6622 - DNA, 25 bp, Homo sapiens
ccagagttcctatctcataagacac

SEQ ID NO: 6623 - DNA, 25 bp, Homo sapiens
cagagttcctatctcataagacacc

SEQ ID NO: 6624 - DNA, 25 bp, Homo sapiens
agagttcctatctcataagacacct

SEQ ID NO: 6625 - DNA, 25 bp, Homo sapiens
gagttcctatctcataagacaccta

SEQ ID NO: 6626 - DNA, 25 bp, Homo sapiens
agttcctatctcataagacacctaa

SEQ ID NO: 6627 - DNA, 25 bp, Homo sapiens
gttcctatctcataagacacctaag

SEQ ID NO: 6628 - DNA, 25 bp, Homo sapiens
ttcctatctcataagacacctaaga

SEQ ID NO: 6629 - DNA, 25 bp, Homo sapiens
tcctatctcataagacacctaagaa

SEQ ID NO: 6630 - DNA, 25 bp, Homo sapiens
cctatctcataagacacctaagaac

SEQ ID NO: 6631 - DNA, 25 bp, Homo sapiens
ctatctcataagacacctaagaacc

SEQ ID NO: 6632 - DNA, 25 bp, Homo sapiens
tatctcataagacacctaagaaccc

SEQ ID NO: 6633 - DNA, 25 bp, Homo sapiens
atctcataagacacctaagaaccca

SEQ ID NO: 6634 - DNA, 25 bp, Homo sapiens
tctcataagacacctaagaacccac

SEQ ID NO: 6635 - DNA, 25 bp, Homo sapiens
ctcataagacacctaagaacccaca

SEQ ID NO: 6636 - DNA, 25 bp, Homo sapiens
tcataagacacctaagaacccacac

SEQ ID NO: 6637 - DNA, 25 bp, Homo sapiens
cataagacacctaagaacccacact

SEQ ID NO: 6638 - DNA, 25 bp, Homo sapiens
ataagacacctaagaacccacactg

SEQ ID NO: 6639 - DNA, 25 bp, Homo sapiens
taagacacctaagaacccacactgg

SEQ ID NO: 6640 - DNA, 25 bp, Homo sapiens
aagacacctaagaacccacactggc

SEQ ID NO: 6641 - DNA, 25 bp, Homo sapiens
agacacctaagaacccacactggcg

SEQ ID NO: 6642 - DNA, 25 bp, Homo sapiens
gacacctaagaacccacactggcga

SEQ ID NO: 6643 - DNA, 25 bp, Homo sapiens
acacctaagaacccacactggcgag

SEQ ID NO: 6644 - DNA, 25 bp, Homo sapiens
cacctaagaacccacactggcgaga

SEQ ID NO: 6645 - DNA, 25 bp, Homo sapiens
acctaagaacccacactggcgagag

SEQ ID NO: 6646 - DNA, 25 bp, Homo sapiens
cctaagaacccacactggcgagagg

SEQ ID NO: 6647 - DNA, 25 bp, Homo sapiens
ctaagaacccacactggcgagaggc

SEQ ID NO: 6648 - DNA, 25 bp, Homo sapiens
taagaacccacactggcgagaggcc

SEQ ID NO: 6649 - DNA, 25 bp, Homo sapiens
aagaacccacactggcgagaggccc

SEQ ID NO: 6650 - DNA, 25 bp, Homo sapiens
agaacccacactggcgagaggccct

SEQ ID NO: 6651 - DNA, 25 bp, Homo sapiens
gaacccacactggcgagaggcccta

SEQ ID NO: 6652 - DNA, 25 bp, Homo sapiens
aacccacactggcgagaggccctat

SEQ ID NO: 6653 - DNA, 25 bp, Homo sapiens
acccacactggcgagaggccctata

SEQ ID NO: 6654 - DNA, 25 bp, Homo sapiens
cccacactggcgagaggccctatac

SEQ ID NO: 6655 - DNA, 25 bp, Homo sapiens
ccacactggcgagaggccctatacg

SEQ ID NO: 6656 - DNA, 25 bp, Homo sapiens
cacactggcgagaggccctatacgt

SEQ ID NO: 6657 - DNA, 25 bp, Homo sapiens
acactggcgagaggccctatacgtg

SEQ ID NO: 6658 - DNA, 25 bp, Homo sapiens
cactggcgagaggccctatacgtgc

SEQ ID NO: 6659 - DNA, 25 bp, Homo sapiens
actggcgagaggccctatacgtgca

SEQ ID NO: 6660 - DNA, 25 bp, Homo sapiens
ctggcgagaggccctatacgtgcat

SEQ ID NO: 6661 - DNA, 25 bp, Homo sapiens
tggcgagaggccctatacgtgcatt

SEQ ID NO: 6662 - DNA, 25 bp, Homo sapiens
ggcgagaggccctatacgtgcattg

SEQ ID NO: 6663 - DNA, 25 bp, Homo sapiens
gcgagaggccctatacgtgcattga

SEQ ID NO: 6664 - DNA, 25 bp, Homo sapiens
cgagaggccctatacgtgcattgag

SEQ ID NO: 6665 - DNA, 25 bp, Homo sapiens
gagaggccctatacgtgcattgagt

SEQ ID NO: 6666 - DNA, 25 bp, Homo sapiens
agaggccctatacgtgcattgagtg

SEQ ID NO: 6667 - DNA, 25 bp, Homo sapiens
gaggccctatacgtgcattgagtgt

SEQ ID NO: 6668 - DNA, 25 bp, Homo sapiens
aggccctatacgtgcattgagtgtg

SEQ ID NO: 6669 - DNA, 25 bp, Homo sapiens
ggccctatacgtgcattgagtgtgg

SEQ ID NO: 6670 - DNA, 25 bp, Homo sapiens
gccctatacgtgcattgagtgtggg

SEQ ID NO: 6671 - DNA, 25 bp, Homo sapiens
ccctatacgtgcattgagtgtggga

SEQ ID NO: 6672 - DNA, 25 bp, Homo sapiens
cctatacgtgcattgagtgtgggaa

SEQ ID NO: 6673 - DNA, 25 bp, Homo sapiens
ctatacgtgcattgagtgtgggaaa

SEQ ID NO: 6674 - DNA, 25 bp, Homo sapiens
tatacgtgcattgagtgtgggaaag

SEQ ID NO: 6675 - DNA, 25 bp, Homo sapiens
atacgtgcattgagtgtgggaaagg

SEQ ID NO: 6676 - DNA, 25 bp, Homo sapiens
tacgtgcattgagtgtgggaaaggc

SEQ ID NO: 6677 - DNA, 25 bp, Homo sapiens
acgtgcattgagtgtgggaaaggct

SEQ ID NO: 6678 - DNA, 25 bp, Homo sapiens
cgtgcattgagtgtgggaaaggctt

SEQ ID NO: 6679 - DNA, 25 bp, Homo sapiens
gtgcattgagtgtgggaaaggcttc

SEQ ID NO: 6680 - DNA, 25 bp, Homo sapiens
tgcattgagtgtgggaaaggcttca

SEQ ID NO: 6681 - DNA, 25 bp, Homo sapiens
gcattgagtgtgggaaaggcttcaa

SEQ ID NO: 6682 - DNA, 25 bp, Homo sapiens
cattgagtgtgggaaaggcttcaaa

SEQ ID NO: 6683 - DNA, 25 bp, Homo sapiens
attgagtgtgggaaaggcttcaaac

SEQ ID NO: 6684 - DNA, 25 bp, Homo sapiens
ttgagtgtgggaaaggcttcaaaca

SEQ ID NO: 6685 - DNA, 25 bp, Homo sapiens
tgagtgtgggaaaggcttcaaacag

SEQ ID NO: 6686 - DNA, 25 bp, Homo sapiens
gagtgtgggaaaggcttcaaacaga

SEQ ID NO: 6687 - DNA, 25 bp, Homo sapiens
agtgtgggaaaggcttcaaacagag

SEQ ID NO: 6688 - DNA, 25 bp, Homo sapiens
gtgtgggaaaggcttcaaacagagc

SEQ ID NO: 6689 - DNA, 25 bp, Homo sapiens
tgtgggaaaggcttcaaacagagct

SEQ ID NO: 6690 - DNA, 25 bp, Homo sapiens
gtgggaaaggcttcaaacagagctc

SEQ ID NO: 6691 - DNA, 25 bp, Homo sapiens
tgggaaaggcttcaaacagagctca

SEQ ID NO: 6692 - DNA, 25 bp, Homo sapiens
gggaaaggcttcaaacagagctcag

SEQ ID NO: 6693 - DNA, 25 bp, Homo sapiens
ggaaaggcttcaaacagagctcaga

SEQ ID NO: 6694 - DNA, 25 bp, Homo sapiens
gaaaggcttcaaacagagctcagac

SEQ ID NO: 6695 - DNA, 25 bp, Homo sapiens
aaaggcttcaaacagagctcagacc

SEQ ID NO: 6696 - DNA, 25 bp, Homo sapiens
aaggcttcaaacagagctcagacct

SEQ ID NO: 6697 - DNA, 25 bp, Homo sapiens
aggcttcaaacagagctcagacctt

SEQ ID NO: 6698 - DNA, 25 bp, Homo sapiens
ggcttcaaacagagctcagaccttg

SEQ ID NO: 6699 - DNA, 25 bp, Homo sapiens
gcttcaaacagagctcagaccttgt

SEQ ID NO: 6700 - DNA, 25 bp, Homo sapiens
cttcaaacagagctcagaccttgtc

SEQ ID NO: 6701 - DNA, 25 bp, Homo sapiens
ttcaaacagagctcagaccttgtca

SEQ ID NO: 6702 - DNA, 25 bp, Homo sapiens
tcaaacagagctcagaccttgtcac

SEQ ID NO: 6703 - DNA, 25 bp, Homo sapiens
caaacagagctcagaccttgtcacc

SEQ ID NO: 6704 - DNA, 25 bp, Homo sapiens
aaacagagctcagaccttgtcaccc

SEQ ID NO: 6705 - DNA, 25 bp, Homo sapiens
aacagagctcagaccttgtcaccca

SEQ ID NO: 6706 - DNA, 25 bp, Homo sapiens
acagagctcagaccttgtcacccat

SEQ ID NO: 6707 - DNA, 25 bp, Homo sapiens
cagagctcagaccttgtcacccatc

SEQ ID NO: 6708 - DNA, 25 bp, Homo sapiens
agagctcagaccttgtcacccatcg

SEQ ID NO: 6709 - DNA, 25 bp, Homo sapiens
gagctcagaccttgtcacccatcgc

SEQ ID NO: 6710 - DNA, 25 bp, Homo sapiens
agctcagaccttgtcacccatcgca

SEQ ID NO: 6711 - DNA, 25 bp, Homo sapiens
gctcagaccttgtcacccatcgcag

SEQ ID NO: 6712 - DNA, 25 bp, Homo sapiens
ctcagaccttgtcacccatcgcaga

SEQ ID NO: 6713 - DNA, 25 bp, Homo sapiens
tcagaccttgtcacccatcgcagaa

SEQ ID NO: 6714 - DNA, 25 bp, Homo sapiens
cagaccttgtcacccatcgcagaac

SEQ ID NO: 6715 - DNA, 25 bp, Homo sapiens
agaccttgtcacccatcgcagaaca

SEQ ID NO: 6716 - DNA, 25 bp, Homo sapiens
gaccttgtcacccatcgcagaacac

SEQ ID NO: 6717 - DNA, 25 bp, Homo sapiens
accttgtcacccatcgcagaacaca

SEQ ID NO: 6718 - DNA, 25 bp, Homo sapiens
ccttgtcacccatcgcagaacacac

SEQ ID NO: 6719 - DNA, 25 bp, Homo sapiens
cttgtcacccatcgcagaacacaca

SEQ ID NO: 6720 - DNA, 25 bp, Homo sapiens
ttgtcacccatcgcagaacacacac

SEQ ID NO: 6721 - DNA, 25 bp, Homo sapiens
tgtcacccatcgcagaacacacaca

SEQ ID NO: 6722 - DNA, 25 bp, Homo sapiens
gtcacccatcgcagaacacacacag

SEQ ID NO: 6723 - DNA, 25 bp, Homo sapiens
tcacccatcgcagaacacacacagg

SEQ ID NO: 6724 - DNA, 25 bp, Homo sapiens
cacccatcgcagaacacacacagga

SEQ ID NO: 6725 - DNA, 25 bp, Homo sapiens
acccatcgcagaacacacacaggag

SEQ ID NO: 6726 - DNA, 25 bp, Homo sapiens
cccatcgcagaacacacacaggaga

SEQ ID NO: 6727 - DNA, 25 bp, Homo sapiens
ccatcgcagaacacacacaggagag

SEQ ID NO: 6728 - DNA, 25 bp, Homo sapiens
catcgcagaacacacacaggagaga

SEQ ID NO: 6729 - DNA, 25 bp, Homo sapiens
atcgcagaacacacacaggagagaa

SEQ ID NO: 6730 - DNA, 25 bp, Homo sapiens
tcgcagaacacacacaggagagaag

SEQ ID NO: 6731 - DNA, 25 bp, Homo sapiens
cgcagaacacacacaggagagaagc

SEQ ID NO: 6732 - DNA, 25 bp, Homo sapiens
gcagaacacacacaggagagaagcc

SEQ ID NO: 6733 - DNA, 25 bp, Homo sapiens
cagaacacacacaggagagaagccc

SEQ ID NO: 6734 - DNA, 25 bp, Homo sapiens
agaacacacacaggagagaagccct

SEQ ID NO: 6735 - DNA, 25 bp, Homo sapiens
gaacacacacaggagagaagcccta

SEQ ID NO: 6736 - DNA, 25 bp, Homo sapiens
aacacacacaggagagaagccctac

SEQ ID NO: 6737 - DNA, 25 bp, Homo sapiens
acacacacaggagagaagccctacc

SEQ ID NO: 6738 - DNA, 25 bp, Homo sapiens
cacacacaggagagaagccctacca

SEQ ID NO: 6739 - DNA, 25 bp, Homo sapiens
acacacaggagagaagccctaccaa

SEQ ID NO: 6740 - DNA, 25 bp, Homo sapiens
cacacaggagagaagccctaccaat

SEQ ID NO: 6741 - DNA, 25 bp, Homo sapiens
acacaggagagaagccctaccaatg

SEQ ID NO: 6742 - DNA, 25 bp, Homo sapiens
cacaggagagaagccctaccaatgc

SEQ ID NO: 6743 - DNA, 25 bp, Homo sapiens
acaggagagaagccctaccaatgca

SEQ ID NO: 6744 - DNA, 25 bp, Homo sapiens
caggagagaagccctaccaatgcaa

SEQ ID NO: 6745 - DNA, 25 bp, Homo sapiens
aggagagaagccctaccaatgcaag

SEQ ID NO: 6746 - DNA, 25 bp, Homo sapiens
ggagagaagccctaccaatgcaagg

SEQ ID NO: 6747 - DNA, 25 bp, Homo sapiens
gagagaagccctaccaatgcaaggg

SEQ ID NO: 6748 - DNA, 25 bp, Homo sapiens
agagaagccctaccaatgcaagggg

SEQ ID NO: 6749 - DNA, 25 bp, Homo sapiens
gagaagccctaccaatgcaaggggt

SEQ ID NO: 6750 - DNA, 25 bp, Homo sapiens
agaagccctaccaatgcaaggggtg

SEQ ID NO: 6751 - DNA, 25 bp, Homo sapiens
gaagccctaccaatgcaaggggtgt

SEQ ID NO: 6752 - DNA, 25 bp, Homo sapiens
aagccctaccaatgcaaggggtgtg

SEQ ID NO: 6753 - DNA, 25 bp, Homo sapiens
agccctaccaatgcaaggggtgtga

SEQ ID NO: 6754 - DNA, 25 bp, Homo sapiens
gccctaccaatgcaaggggtgtgag

SEQ ID NO: 6755 - DNA, 25 bp, Homo sapiens
ccctaccaatgcaaggggtgtgaga

SEQ ID NO: 6756 - DNA, 25 bp, Homo sapiens
cctaccaatgcaaggggtgtgagaa

SEQ ID NO: 6757 - DNA, 25 bp, Homo sapiens
ctaccaatgcaaggggtgtgagaag

SEQ ID NO: 6758 - DNA, 25 bp, Homo sapiens
taccaatgcaaggggtgtgagaaga

SEQ ID NO: 6759 - DNA, 25 bp, Homo sapiens
accaatgcaaggggtgtgagaagaa

SEQ ID NO: 6760 - DNA, 25 bp, Homo sapiens
ccaatgcaaggggtgtgagaagaaa

SEQ ID NO: 6761 - DNA, 25 bp, Homo sapiens
caatgcaaggggtgtgagaagaaat

SEQ ID NO: 6762 - DNA, 25 bp, Homo sapiens
aatgcaaggggtgtgagaagaaatt

SEQ ID NO: 6763 - DNA, 25 bp, Homo sapiens
atgcaaggggtgtgagaagaaattc

SEQ ID NO: 6764 - DNA, 25 bp, Homo sapiens
tgcaaggggtgtgagaagaaattca

SEQ ID NO: 6765 - DNA, 25 bp, Homo sapiens
gcaaggggtgtgagaagaaattcag

SEQ ID NO: 6766 - DNA, 25 bp, Homo sapiens
caaggggtgtgagaagaaattcagc

SEQ ID NO: 6767 - DNA, 25 bp, Homo sapiens
aaggggtgtgagaagaaattcagcg

SEQ ID NO: 6768 - DNA, 25 bp, Homo sapiens
aggggtgtgagaagaaattcagcga

SEQ ID NO: 6769 - DNA, 25 bp, Homo sapiens
ggggtgtgagaagaaattcagcgac

SEQ ID NO: 6770 - DNA, 25 bp, Homo sapiens
gggtgtgagaagaaattcagcgaca

SEQ ID NO: 6771 - DNA, 25 bp, Homo sapiens
ggtgtgagaagaaattcagcgacag

SEQ ID NO: 6772 - DNA, 25 bp, Homo sapiens
gtgtgagaagaaattcagcgacagc

SEQ ID NO: 6773 - DNA, 25 bp, Homo sapiens
tgtgagaagaaattcagcgacagct

SEQ ID NO: 6774 - DNA, 25 bp, Homo sapiens
gtgagaagaaattcagcgacagctc

SEQ ID NO: 6775 - DNA, 25 bp, Homo sapiens
tgagaagaaattcagcgacagctca

SEQ ID NO: 6776 - DNA, 25 bp, Homo sapiens
gagaagaaattcagcgacagctcaa

SEQ ID NO: 6777 - DNA, 25 bp, Homo sapiens
agaagaaattcagcgacagctcaac

SEQ ID NO: 6778 - DNA, 25 bp, Homo sapiens
gaagaaattcagcgacagctcaaca

SEQ ID NO: 6779 - DNA, 25 bp, Homo sapiens
aagaaattcagcgacagctcaacac

SEQ ID NO: 6780 - DNA, 25 bp, Homo sapiens
agaaattcagcgacagctcaacact

SEQ ID NO: 6781 - DNA, 25 bp, Homo sapiens
gaaattcagcgacagctcaacactc

SEQ ID NO: 6782 - DNA, 25 bp, Homo sapiens
aaattcagcgacagctcaacactca

SEQ ID NO: 6783 - DNA, 25 bp, Homo sapiens
aattcagcgacagctcaacactcat

SEQ ID NO: 6784 - DNA, 25 bp, Homo sapiens
attcagcgacagctcaacactcatc

SEQ ID NO: 6785 - DNA, 25 bp, Homo sapiens
ttcagcgacagctcaacactcatca

SEQ ID NO: 6786 - DNA, 25 bp, Homo sapiens
tcagcgacagctcaacactcatcaa

SEQ ID NO: 6787 - DNA, 25 bp, Homo sapiens
cagcgacagctcaacactcatcaaa

SEQ ID NO: 6788 - DNA, 25 bp, Homo sapiens
agcgacagctcaacactcatcaaac

SEQ ID NO: 6789 - DNA, 25 bp, Homo sapiens
gcgacagctcaacactcatcaaaca

SEQ ID NO: 6790 - DNA, 25 bp, Homo sapiens
cgacagctcaacactcatcaaacat

SEQ ID NO: 6791 - DNA, 25 bp, Homo sapiens
gacagctcaacactcatcaaacatc

SEQ ID NO: 6792 - DNA, 25 bp, Homo sapiens
acagctcaacactcatcaaacatca

SEQ ID NO: 6793 - DNA, 25 bp, Homo sapiens
cagctcaacactcatcaaacatcag

SEQ ID NO: 6794 - DNA, 25 bp, Homo sapiens
agctcaacactcatcaaacatcaga

SEQ ID NO: 6795 - DNA, 25 bp, Homo sapiens
gctcaacactcatcaaacatcagag

SEQ ID NO: 6796 - DNA, 25 bp, Homo sapiens
ctcaacactcatcaaacatcagaga

SEQ ID NO: 6797 - DNA, 25 bp, Homo sapiens
tcaacactcatcaaacatcagagaa

SEQ ID NO: 6798 - DNA, 25 bp, Homo sapiens
caacactcatcaaacatcagagaac

SEQ ID NO: 6799 - DNA, 25 bp, Homo sapiens
aacactcatcaaacatcagagaacc

SEQ ID NO: 6800 - DNA, 25 bp, Homo sapiens
acactcatcaaacatcagagaaccc

SEQ ID NO: 6801 - DNA, 25 bp, Homo sapiens
cactcatcaaacatcagagaaccca

SEQ ID NO: 6802 - DNA, 25 bp, Homo sapiens
actcatcaaacatcagagaacccac

SEQ ID NO: 6803 - DNA, 25 bp, Homo sapiens
ctcatcaaacatcagagaacccaca

SEQ ID NO: 6804 - DNA, 25 bp, Homo sapiens
tcatcaaacatcagagaacccacac

SEQ ID NO: 6805 - DNA, 25 bp, Homo sapiens
catcaaacatcagagaacccacaca

SEQ ID NO: 6806 - DNA, 25 bp, Homo sapiens
atcaaacatcagagaacccacacag

SEQ ID NO: 6807 - DNA, 25 bp, Homo sapiens
tcaaacatcagagaacccacacagg

SEQ ID NO: 6808 - DNA, 25 bp, Homo sapiens
caaacatcagagaacccacacaggg

SEQ ID NO: 6809 - DNA, 25 bp, Homo sapiens
aaacatcagagaacccacacagggg

SEQ ID NO: 6810 - DNA, 25 bp, Homo sapiens
aacatcagagaacccacacagggga

SEQ ID NO: 6811 - DNA, 25 bp, Homo sapiens
acatcagagaacccacacaggggag

SEQ ID NO: 6812 - DNA, 25 bp, Homo sapiens
catcagagaacccacacaggggaga

SEQ ID NO: 6813 - DNA, 25 bp, Homo sapiens
atcagagaacccacacaggggagag

SEQ ID NO: 6814 - DNA, 25 bp, Homo sapiens
tcagagaacccacacaggggagaga

SEQ ID NO: 6815 - DNA, 25 bp, Homo sapiens
cagagaacccacacaggggagagac

SEQ ID NO: 6816 - DNA, 25 bp, Homo sapiens
agagaacccacacaggggagagacc

SEQ ID NO: 6817 - DNA, 25 bp, Homo sapiens
gagaacccacacaggggagagaccc

SEQ ID NO: 6818 - DNA, 25 bp, Homo sapiens
agaacccacacaggggagagaccct

SEQ ID NO: 6819 - DNA, 25 bp, Homo sapiens
gaacccacacaggggagagacccta

SEQ ID NO: 6820 - DNA, 25 bp, Homo sapiens
aacccacacaggggagagaccctat

SEQ ID NO: 6821 - DNA, 25 bp, Homo sapiens
acccacacaggggagagaccctatg

SEQ ID NO: 6822 - DNA, 25 bp, Homo sapiens
cccacacaggggagagaccctatga

SEQ ID NO: 6823 - DNA, 25 bp, Homo sapiens
ccacacaggggagagaccctatgag

SEQ ID NO: 6824 - DNA, 25 bp, Homo sapiens
cacacaggggagagaccctatgagt

SEQ ID NO: 6825 - DNA, 25 bp, Homo sapiens
acacaggggagagaccctatgagtg

SEQ ID NO: 6826 - DNA, 25 bp, Homo sapiens
cacaggggagagaccctatgagtgc

SEQ ID NO: 6827 - DNA, 25 bp, Homo sapiens
acaggggagagaccctatgagtgcc

SEQ ID NO: 6828 - DNA, 25 bp, Homo sapiens
caggggagagaccctatgagtgccc

SEQ ID NO: 6829 - DNA, 25 bp, Homo sapiens
aggggagagaccctatgagtgccca

SEQ ID NO: 6830 - DNA, 25 bp, Homo sapiens
ggggagagaccctatgagtgcccag

SEQ ID NO: 6831 - DNA, 25 bp, Homo sapiens
gggagagaccctatgagtgcccaga

SEQ ID NO: 6832 - DNA, 25 bp, Homo sapiens
ggagagaccctatgagtgcccagag

SEQ ID NO: 6833 - DNA, 25 bp, Homo sapiens
gagagaccctatgagtgcccagagt

SEQ ID NO: 6834 - DNA, 25 bp, Homo sapiens
agagaccctatgagtgcccagagtg

SEQ ID NO: 6835 - DNA, 25 bp, Homo sapiens
gagaccctatgagtgcccagagtgt

SEQ ID NO: 6836 - DNA, 25 bp, Homo sapiens
agaccctatgagtgcccagagtgtg

SEQ ID NO: 6837 - DNA, 25 bp, Homo sapiens
gaccctatgagtgcccagagtgtgg

SEQ ID NO: 6838 - DNA, 25 bp, Homo sapiens
accctatgagtgcccagagtgtgga

SEQ ID NO: 6839 - DNA, 25 bp, Homo sapiens
ccctatgagtgcccagagtgtggaa

SEQ ID NO: 6840 - DNA, 25 bp, Homo sapiens
cctatgagtgcccagagtgtggaaa

SEQ ID NO: 6841 - DNA, 25 bp, Homo sapiens
ctatgagtgcccagagtgtggaaag

SEQ ID NO: 6842 - DNA, 25 bp, Homo sapiens
tatgagtgcccagagtgtggaaaga

SEQ ID NO: 6843 - DNA, 25 bp, Homo sapiens
atgagtgcccagagtgtggaaagac

SEQ ID NO: 6844 - DNA, 25 bp, Homo sapiens
tgagtgcccagagtgtggaaagact

SEQ ID NO: 6845 - DNA, 25 bp, Homo sapiens
gagtgcccagagtgtggaaagactt

SEQ ID NO: 6846 - DNA, 25 bp, Homo sapiens
agtgcccagagtgtggaaagacttt

SEQ ID NO: 6847 - DNA, 25 bp, Homo sapiens
gtgcccagagtgtggaaagactttt

SEQ ID NO: 6848 - DNA, 25 bp, Homo sapiens
tgcccagagtgtggaaagacttttg

SEQ ID NO: 6849 - DNA, 25 bp, Homo sapiens
gcccagagtgtggaaagacttttgg

SEQ ID NO: 6850 - DNA, 25 bp, Homo sapiens
cccagagtgtggaaagacttttggg

SEQ ID NO: 6851 - DNA, 25 bp, Homo sapiens
ccagagtgtggaaagacttttgggc

SEQ ID NO: 6852 - DNA, 25 bp, Homo sapiens
cagagtgtggaaagacttttgggcg

SEQ ID NO: 6853 - DNA, 25 bp, Homo sapiens
agagtgtggaaagacttttgggcgg

SEQ ID NO: 6854 - DNA, 25 bp, Homo sapiens
gagtgtggaaagacttttgggcgga

SEQ ID NO: 6855 - DNA, 25 bp, Homo sapiens
agtgtggaaagacttttgggcggaa

SEQ ID NO: 6856 - DNA, 25 bp, Homo sapiens
gtgtggaaagacttttgggcggaag

SEQ ID NO: 6857 - DNA, 25 bp, Homo sapiens
tgtggaaagacttttgggcggaagc

SEQ ID NO: 6858 - DNA, 25 bp, Homo sapiens
gtggaaagacttttgggcggaagcc

SEQ ID NO: 6859 - DNA, 25 bp, Homo sapiens
tggaaagacttttgggcggaagcca

SEQ ID NO: 6860 - DNA, 25 bp, Homo sapiens
ggaaagacttttgggcggaagccac

SEQ ID NO: 6861 - DNA, 25 bp, Homo sapiens
gaaagacttttgggcggaagccaca

SEQ ID NO: 6862 - DNA, 25 bp, Homo sapiens
aaagacttttgggcggaagccacac

SEQ ID NO: 6863 - DNA, 25 bp, Homo sapiens
aagacttttgggcggaagccacacc

SEQ ID NO: 6864 - DNA, 25 bp, Homo sapiens
agacttttgggcggaagccacacct

SEQ ID NO: 6865 - DNA, 25 bp, Homo sapiens
gacttttgggcggaagccacacctc

SEQ ID NO: 6866 - DNA, 25 bp, Homo sapiens
acttttgggcggaagccacacctca

SEQ ID NO: 6867 - DNA, 25 bp, Homo sapiens
cttttgggcggaagccacacctcat

SEQ ID NO: 6868 - DNA, 25 bp, Homo sapiens
ttttgggcggaagccacacctcata

SEQ ID NO: 6869 - DNA, 25 bp, Homo sapiens
tttgggcggaagccacacctcataa

SEQ ID NO: 6870 - DNA, 25 bp, Homo sapiens
ttgggcggaagccacacctcataat

SEQ ID NO: 6871 - DNA, 25 bp, Homo sapiens
tgggcggaagccacacctcataatg

SEQ ID NO: 6872 - DNA, 25 bp, Homo sapiens
gggcggaagccacacctcataatgc

SEQ ID NO: 6873 - DNA, 25 bp, Homo sapiens
ggcggaagccacacctcataatgca

SEQ ID NO: 6874 - DNA, 25 bp, Homo sapiens
gcggaagccacacctcataatgcac

SEQ ID NO: 6875 - DNA, 25 bp, Homo sapiens
cggaagccacacctcataatgcacc

SEQ ID NO: 6876 - DNA, 25 bp, Homo sapiens
ggaagccacacctcataatgcacca

SEQ ID NO: 6877 - DNA, 25 bp, Homo sapiens
gaagccacacctcataatgcaccaa

SEQ ID NO: 6878 - DNA, 25 bp, Homo sapiens
aagccacacctcataatgcaccaaa

SEQ ID NO: 6879 - DNA, 25 bp, Homo sapiens
agccacacctcataatgcaccaaag

SEQ ID NO: 6880 - DNA, 25 bp, Homo sapiens
gccacacctcataatgcaccaaaga

SEQ ID NO: 6881 - DNA, 25 bp, Homo sapiens
ccacacctcataatgcaccaaagaa

SEQ ID NO: 6882 - DNA, 25 bp, Homo sapiens
cacacctcataatgcaccaaagaac

SEQ ID NO: 6883 - DNA, 25 bp, Homo sapiens
acacctcataatgcaccaaagaacc

SEQ ID NO: 6884 - DNA, 25 bp, Homo sapiens
cacctcataatgcaccaaagaaccc

SEQ ID NO: 6885 - DNA, 25 bp, Homo sapiens
acctcataatgcaccaaagaaccca

SEQ ID NO: 6886 - DNA, 25 bp, Homo sapiens
cctcataatgcaccaaagaacccac

SEQ ID NO: 6887 - DNA, 25 bp, Homo sapiens
ctcataatgcaccaaagaacccaca

SEQ ID NO: 6888 - DNA, 25 bp, Homo sapiens
tcataatgcaccaaagaacccacac

SEQ ID NO: 6889 - DNA, 25 bp, Homo sapiens
cataatgcaccaaagaacccacaca

SEQ ID NO: 6890 - DNA, 25 bp, Homo sapiens
ataatgcaccaaagaacccacacag

SEQ ID NO: 6891 - DNA, 25 bp, Homo sapiens
taatgcaccaaagaacccacacagg

SEQ ID NO: 6892 - DNA, 25 bp, Homo sapiens
aatgcaccaaagaacccacacaggc

SEQ ID NO: 6893 - DNA, 25 bp, Homo sapiens
atgcaccaaagaacccacacaggcg

SEQ ID NO: 6894 - DNA, 25 bp, Homo sapiens
tgcaccaaagaacccacacaggcga

SEQ ID NO: 6895 - DNA, 25 bp, Homo sapiens
gcaccaaagaacccacacaggcgag

SEQ ID NO: 6896 - DNA, 25 bp, Homo sapiens
caccaaagaacccacacaggcgaga

SEQ ID NO: 6897 - DNA, 25 bp, Homo sapiens
accaaagaacccacacaggcgagaa

SEQ ID NO: 6898 - DNA, 25 bp, Homo sapiens
ccaaagaacccacacaggcgagaag

SEQ ID NO: 6899 - DNA, 25 bp, Homo sapiens
caaagaacccacacaggcgagaagc

SEQ ID NO: 6900 - DNA, 25 bp, Homo sapiens
aaagaacccacacaggcgagaagcc

SEQ ID NO: 6901 - DNA, 25 bp, Homo sapiens
aagaacccacacaggcgagaagccc

SEQ ID NO: 6902 - DNA, 25 bp, Homo sapiens
agaacccacacaggcgagaagccct

SEQ ID NO: 6903 - DNA, 25 bp, Homo sapiens
gaacccacacaggcgagaagcccta

SEQ ID NO: 6904 - DNA, 25 bp, Homo sapiens
aacccacacaggcgagaagccctac

SEQ ID NO: 6905 - DNA, 25 bp, Homo sapiens
acccacacaggcgagaagccctacg

SEQ ID NO: 6906 - DNA, 25 bp, Homo sapiens
cccacacaggcgagaagccctacgc

SEQ ID NO: 6907 - DNA, 25 bp, Homo sapiens
ccacacaggcgagaagccctacgcg

SEQ ID NO: 6908 - DNA, 25 bp, Homo sapiens
cacacaggcgagaagccctacgcgt

SEQ ID NO: 6909 - DNA, 25 bp, Homo sapiens
acacaggcgagaagccctacgcgtg

SEQ ID NO: 6910 - DNA, 25 bp, Homo sapiens
cacaggcgagaagccctacgcgtgc

SEQ ID NO: 6911 - DNA, 25 bp, Homo sapiens
acaggcgagaagccctacgcgtgcc

SEQ ID NO: 6912 - DNA, 25 bp, Homo sapiens
caggcgagaagccctacgcgtgcct

SEQ ID NO: 6913 - DNA, 25 bp, Homo sapiens
aggcgagaagccctacgcgtgcctg

SEQ ID NO: 6914 - DNA, 25 bp, Homo sapiens
ggcgagaagccctacgcgtgcctgg

SEQ ID NO: 6915 - DNA, 25 bp, Homo sapiens
gcgagaagccctacgcgtgcctgga

SEQ ID NO: 6916 - DNA, 25 bp, Homo sapiens
cgagaagccctacgcgtgcctggaa

SEQ ID NO: 6917 - DNA, 25 bp, Homo sapiens
gagaagccctacgcgtgcctggaat

SEQ ID NO: 6918 - DNA, 25 bp, Homo sapiens
agaagccctacgcgtgcctggaatg

SEQ ID NO: 6919 - DNA, 25 bp, Homo sapiens
gaagccctacgcgtgcctggaatgt

SEQ ID NO: 6920 - DNA, 25 bp, Homo sapiens
aagccctacgcgtgcctggaatgtc

SEQ ID NO: 6921 - DNA, 25 bp, Homo sapiens
agccctacgcgtgcctggaatgtca

SEQ ID NO: 6922 - DNA, 25 bp, Homo sapiens
gccctacgcgtgcctggaatgtcac

SEQ ID NO: 6923 - DNA, 25 bp, Homo sapiens
ccctacgcgtgcctggaatgtcaca

SEQ ID NO: 6924 - DNA, 25 bp, Homo sapiens
cctacgcgtgcctggaatgtcacaa

SEQ ID NO: 6925 - DNA, 25 bp, Homo sapiens
ctacgcgtgcctggaatgtcacaaa

SEQ ID NO: 6926 - DNA, 25 bp, Homo sapiens
tacgcgtgcctggaatgtcacaaaa

SEQ ID NO: 6927 - DNA, 25 bp, Homo sapiens
acgcgtgcctggaatgtcacaaaag

SEQ ID NO: 6928 - DNA, 25 bp, Homo sapiens
cgcgtgcctggaatgtcacaaaagc

SEQ ID NO: 6929 - DNA, 25 bp, Homo sapiens
gcgtgcctggaatgtcacaaaagct

SEQ ID NO: 6930 - DNA, 25 bp, Homo sapiens
cgtgcctggaatgtcacaaaagctt

SEQ ID NO: 6931 - DNA, 25 bp, Homo sapiens
gtgcctggaatgtcacaaaagcttc

SEQ ID NO: 6932 - DNA, 25 bp, Homo sapiens
tgcctggaatgtcacaaaagcttca

SEQ ID NO: 6933 - DNA, 25 bp, Homo sapiens
gcctggaatgtcacaaaagcttcag

SEQ ID NO: 6934 - DNA, 25 bp, Homo sapiens
cctggaatgtcacaaaagcttcagt

SEQ ID NO: 6935 - DNA, 25 bp, Homo sapiens
ctggaatgtcacaaaagcttcagtc

SEQ ID NO: 6936 - DNA, 25 bp, Homo sapiens
tggaatgtcacaaaagcttcagtcg

SEQ ID NO: 6937 - DNA, 25 bp, Homo sapiens
ggaatgtcacaaaagcttcagtcga

SEQ ID NO: 6938 - DNA, 1518 bp, Homo sapiens
atgtggctggggacttcagggaagagtgggttacctggacactgcttagagaatcctctccaggaatgccacccagcacagttagaagaatgggctctcaaaggactgggttggactctcacctctgccacttaacttctgagacttctgaggtctttgtggaaaaggagaatttccaggcctagtgtaatctcccagccggagcagaaagaagagccatgggtcctaccactccaaaactttgaggcgaggaagatcccgagggaaagccacacagactgtgagcatcaggtggcaaagctcaatcaggacaattctgaaacagcagaacaatgtggaacatcctcagaaaggaccaataaagatctttctcatactcttagttggggaggaaactgggagcaaggcctagaattagaagggcaacatggaacccttccaggagagggccagctggagtccttttcacaggagagggatttaaacaagctcctggatggatatgtaggagagaagcctatgtgtgcagaatgcgggaaaagctttaaccagagttcctatctcataagacacctaagaacccacactggcgagaggccctatacgtgcattgagtgtgggaaaggcttcaaacagagctcagaccttgtcacccatcgcagaacacacacaggagagaagccctaccaatgcaaggggtgtgagaagaaattcagcgacagctcaacactcatcaaacatcagagaacccacacaggggagagaccctatgagtgcccagagtgtggaaagacttttgggcggaagccacacctcataatgcaccaaagaacccacacaggcgagaagccctacgcgtgcctggaatgtcacaaaagcttcagtcgaagctcaaatttcatcactcaccagaggacccacacaggggtgaagccttacaggtgtaatgactgtggggagagttttagccagagctcggatttgattaagcaccaacgaacccacacgggagaacggcccttcaaatgcccggagtgcgggaagggcttcagagatagttctcattttgtagctcacatgagcactcattcaggagagaggcctttcagttgtcctgactgccacaaaagcttcagtcagagctcacatttggtcacgcaccaaagaacacacacaggtgagagaccttttaagtgcgaaaactgtgggaaaggattcgccgacagctccgccctcattaagcaccaacgaatccacaccggagaaagaccctacaaatgtggagagtgtgggaagagcttcaatcagagctcccactttattacccatcagcgaatccacttaggagacaggccctatcgatgtcctgagtgtggcaagaccttcaatcagcgttcccatttcctcacacaccagagaacgcatacaggagaaaaacctttccactgtagtaaatgtaacaagagcttccgtcagaaagcgcatcttttatgccatcaaaacacccatttgatttag

SEQ ID NO: 6939 - protein, 44 aa, Homo sapiens
MWLGTSGKSGLPGHCLENPLQECHPAQLEEWALKGLGWTLTSAT

SEQ ID NO: 6940 - protein, 332 aa, Homo sapiens [sequence omitted]

SEQ ID NO: 6941 - DNA, 66 bp, Homo sapiens
actgggttggactctcacctctgccacttaacttctgagacttctgaggtctttgtggaaaaggag

SEQ ID NO: 6942 - protein, 9 aa, Homo sapiens
LGWTLTSAT

SEQ ID NO: 6943 - DNA, 500 bp, Homo sapiens
tgctctcctttaatttgagacttagatatttggagagggcccaggtctgaggagtttctggtatgttggcatcttagagctccagacctctgtaagattaattgttgcctccttgggagaaaaacaattacttccttatgcattttatggtttgcaaatgtctttgctatttattgtccttttaatatctcatcataactttttgacttatgtattactatcccccttttccagcctgggttggactctcacctctgccacttaacttctgagacttctgaggtctttgtggaaaaggaggtattttttctgtcacttaaaaacaggctgggggcagtggctcacgcctgtaatcccagcactttggtaggatgaggtgggcggatcataaggtcaggagttagagaccagcctggccaacatgatgaaaccctgtctctactaaaaataaaaaaattagctgggtgtgataaggggcgcctgtaatcccagctactttg

SEQ ID NO: 6944 - DNA, 17 bp, Homo sapiens
actgggttggactctca

SEQ ID NO: 6945 - DNA, 17 bp, Homo sapiens
ctgggttggactctcac

SEQ ID NO: 6946 - DNA, 17 bp, Homo sapiens
tgggttggactctcacc

SEQ ID NO: 6947 - DNA, 17 bp, Homo sapiens
gggttggactctcacct

SEQ ID NO: 6948 - DNA, 17 bp, Homo sapiens
ggttggactctcacctc

SEQ ID NO: 6949 - DNA, 17 bp, Homo sapiens
gttggactctcacctct

SEQ ID NO: 6950 - DNA, 17 bp, Homo sapiens
ttggactctcacctctg

SEQ ID NO: 6951 - DNA, 17 bp, Homo sapiens
tggactctcacctctgc

SEQ ID NO: 6952 - DNA, 17 bp, Homo sapiens
ggactctcacctctgcc

SEQ ID NO: 6953 - DNA, 17 bp, Homo sapiens
gactctcacctctgcca

SEQ ID NO: 6954 - DNA, 17 bp, Homo sapiens
actctcacctctgccac

SEQ ID NO: 6955 - DNA, 17 bp, Homo sapiens
ctctcacctctgccact

SEQ ID NO: 6956 - DNA, 17 bp, Homo sapiens
tctcacctctgccactt

SEQ ID NO: 6957 - DNA, 17 bp, Homo sapiens
ctcacctctgccactta

SEQ ID NO: 6958 - DNA, 17 bp, Homo sapiens
tcacctctgccacttaa

SEQ ID NO: 6959 - DNA, 17 bp, Homo sapiens
cacctctgccacttaac

SEQ ID NO: 6960 - DNA, 17 bp, Homo sapiens
acctctgccacttaact

SEQ ID NO: 6961 - DNA, 17 bp, Homo sapiens
cctctgccacttaactt

SEQ ID NO: 6962 - DNA, 17 bp, Homo sapiens
ctctgccacttaacttc

SEQ ID NO: 6963 - DNA, 17 bp, Homo sapiens
tctgccacttaacttct

SEQ ID NO: 6964 - DNA, 17 bp, Homo sapiens
ctgccacttaacttctg

SEQ ID NO: 6965 - DNA, 17 bp, Homo sapiens
tgccacttaacttctga

SEQ ID NO: 6966 - DNA, 17 bp, Homo sapiens
gccacttaacttctgag

SEQ ID NO: 6967 - DNA, 17 bp, Homo sapiens
ccacttaacttctgaga

SEQ ID NO: 6968 - DNA, 17 bp, Homo sapiens
cacttaacttctgagac

SEQ ID NO: 6969 - DNA, 17 bp, Homo sapiens
acttaacttctgagact

SEQ ID NO: 6970 - DNA, 17 bp, Homo sapiens
cttaacttctgagactt

SEQ ID NO: 6971 - DNA, 17 bp, Homo sapiens
ttaacttctgagacttc

SEQ ID NO: 6972 - DNA, 17 bp, Homo sapiens
taacttctgagacttct

SEQ ID NO: 6973 - DNA, 17 bp, Homo sapiens
aacttctgagacttctg

SEQ ID NO: 6974 - DNA, 17 bp, Homo sapiens
acttctgagacttctga

SEQ ID NO: 6975 - DNA, 17 bp, Homo sapiens
cttctgagacttctgag

SEQ ID NO: 6976 - DNA, 17 bp, Homo sapiens
ttctgagacttctgagg

SEQ ID NO: 6977 - DNA, 17 bp, Homo sapiens
tctgagacttctgaggt

SEQ ID NO: 6978 - DNA, 17 bp, Homo sapiens
ctgagacttctgaggtc

SEQ ID NO: 6979 - DNA, 17 bp, Homo sapiens
tgagacttctgaggtct

SEQ ID NO: 6980 - DNA, 17 bp, Homo sapiens
gagacttctgaggtctt

SEQ ID NO: 6981 - DNA, 17 bp, Homo sapiens
agacttctgaggtcttt

SEQ ID NO: 6982 - DNA, 17 bp, Homo sapiens
gacttctgaggtctttg

SEQ ID NO: 6983 - DNA, 17 bp, Homo sapiens
acttctgaggtctttgt

SEQ ID NO: 6984 - DNA, 17 bp, Homo sapiens
cttctgaggtctttgtg

SEQ ID NO: 6985 - DNA, 17 bp, Homo sapiens
ttctgaggtctttgtgg

SEQ ID NO: 6986 - DNA, 17 bp, Homo sapiens
tctgaggtctttgtgga

SEQ ID NO: 6987 - DNA, 17 bp, Homo sapiens
ctgaggtctttgtggaa

SEQ ID NO: 6988 - DNA, 17 bp, Homo sapiens
tgaggtctttgtggaaa

SEQ ID NO: 6989 - DNA, 17 bp, Homo sapiens
gaggtctttgtggaaaa

SEQ ID NO: 6990 - DNA, 17 bp, Homo sapiens
aggtctttgtggaaaag

SEQ ID NO: 6991 - DNA, 17 bp, Homo sapiens
ggtctttgtggaaaagg

SEQ ID NO: 6992 - DNA, 17 bp, Homo sapiens
gtctttgtggaaaagga

SEQ ID NO: 6993 - DNA, 17 bp, Homo sapiens
tctttgtggaaaaggag

SEQ ID NO: 6994 - DNA, 25 bp, Homo sapiens
actgggttggactctcacctctgcc

SEQ ID NO: 6995 - DNA, 25 bp, Homo sapiens
ctgggttggactctcacctctgcca

SEQ ID NO: 6996 - DNA, 25 bp, Homo sapiens
tgggttggactctcacctctgccac

SEQ ID NO: 6997 - DNA, 25 bp, Homo sapiens
gggttggactctcacctctgccact

SEQ ID NO: 6998 - DNA, 25 bp, Homo sapiens
ggttggactctcacctctgccactt

SEQ ID NO: 6999 - DNA, 25 bp, Homo sapiens
gttggactctcacctctgccactta

SEQ ID NO: 7000 - DNA, 25 bp, Homo sapiens
ttggactctcacctctgccacttaa

SEQ ID NO: 7001 - DNA, 25 bp, Homo sapiens
tggactctcacctctgccacttaac

SEQ ID NO: 7002 - DNA, 25 bp, Homo sapiens
ggactctcacctctgccacttaact

SEQ ID NO: 7003 - DNA, 25 bp, Homo sapiens
gactctcacctctgccacttaactt

SEQ ID NO: 7004 - DNA, 25 bp, Homo sapiens
actctcacctctgccacttaacttc

SEQ ID NO: 7005 - DNA, 25 bp, Homo sapiens
ctctcacctctgccacttaacttct

SEQ ID NO: 7006 - DNA, 25 bp, Homo sapiens
tctcacctctgccacttaacttctg

SEQ ID NO: 7007 - DNA, 25 bp, Homo sapiens
ctcacctctgccacttaacttctga

SEQ ID NO: 7008 - DNA, 25 bp, Homo sapiens
tcacctctgccacttaacttctgag

SEQ ID NO: 7009 - DNA, 25 bp, Homo sapiens
cacctctgccacttaacttctgaga

SEQ ID NO: 7010 - DNA, 25 bp, Homo sapiens
acctctgccacttaacttctgagac

SEQ ID NO: 7011 - DNA, 25 bp, Homo sapiens
cctctgccacttaacttctgagact

SEQ ID NO: 7012 - DNA, 25 bp, Homo sapiens
ctctgccacttaacttctgagactt

SEQ ID NO: 7013 - DNA, 25 bp, Homo sapiens
tctgccacttaacttctgagacttc

SEQ ID NO: 7014 - DNA, 25 bp, Homo sapiens
ctgccacttaacttctgagacttct

SEQ ID NO: 7015 - DNA, 25 bp, Homo sapiens
tgccacttaacttctgagacttctg

SEQ ID NO: 7016 - DNA, 25 bp, Homo sapiens
gccacttaacttctgagacttctga

SEQ ID NO: 7017 - DNA, 25 bp, Homo sapiens
ccacttaacttctgagacttctgag

SEQ ID NO: 7018 - DNA, 25 bp, Homo sapiens
cacttaacttctgagacttctgagg

SEQ ID NO: 7019 - DNA, 25 bp, Homo sapiens
acttaacttctgagacttctgaggt

SEQ ID NO: 7020 - DNA, 25 bp, Homo sapiens
cttaacttctgagacttctgaggtc

SEQ ID NO: 7021 - DNA, 25 bp, Homo sapiens
ttaacttctgagacttctgaggtct

SEQ ID NO: 7022 - DNA, 25 bp, Homo sapiens
taacttctgagacttctgaggtctt

SEQ ID NO: 7023 - DNA, 25 bp, Homo sapiens
aacttctgagacttctgaggtcttt

SEQ ID NO: 7024 - DNA, 25 bp, Homo sapiens
acttctgagacttctgaggtctttg

SEQ ID NO: 7025 - DNA, 25 bp, Homo sapiens
cttctgagacttctgaggtctttgt

SEQ ID NO: 7026 - DNA, 25 bp, Homo sapiens
ttctgagacttctgaggtctttgtg

SEQ ID NO: 7027 - DNA, 25 bp, Homo sapiens
tctgagacttctgaggtctttgtgg

SEQ ID NO: 7028 - DNA, 25 bp, Homo sapiens
ctgagacttctgaggtctttgtgga

SEQ ID NO: 7029 - DNA, 25 bp, Homo sapiens
tgagacttctgaggtctttgtggaa

SEQ ID NO: 7030 - DNA, 25 bp, Homo sapiens
gagacttctgaggtctttgtggaaa

SEQ ID NO: 7031 - DNA, 25 bp, Homo sapiens
agacttctgaggtctttgtggaaaa

SEQ ID NO: 7032 - DNA, 25 bp, Homo sapiens
gacttctgaggtctttgtggaaaag

SEQ ID NO: 7033 - DNA, 25 bp, Homo sapiens
acttctgaggtctttgtggaaaagg

SEQ ID NO: 7034 - DNA, 25 bp, Homo sapiens
cttctgaggtctttgtggaaaagga

SEQ ID NO: 7035 - DNA, 25 bp, Homo sapiens
ttctgaggtctttgtggaaaaggag

SEQ ID NO: 7036 - DNA, 34 bp, Homo sapiens
ttactaaatcaaatgggtgttttgatggcataaa

SEQ ID NO: 7037 - DNA, 29 bp, Homo sapiens
gcatcaggtggcaaagctcaatcaggaca

SEQ ID NO: 7038 - DNA, 29 bp, Homo sapiens
cactcaatgcacgtatagggcctctcgcc

SEQ ID NO: 7039 - DNA, 29 bp, Homo sapiens
tgtcctgattgagctttgccacctgatgc

SEQ ID NO: 7040 - DNA, 32 bp, Homo sapiens
ggtcacctgtacgctcctctccatgtctcttc

SEQ ID NO: 7041 - DNA, 28 bp, Homo sapiens
ctgtttggcttccgacctgctcctcacc

SEQ ID NO: 7042 - DNA, 39 bp, Homo sapiens
ccaccatgtggctggggacttcagggaagagtgggttac

SEQ ID NO: 7043 - DNA, 20 bp, Homo sapiens
gatggcggaagctcctcagc

SEQ ID NO: 7044 - DNA, 20 bp, Homo sapiens
agtcctgcggttccacatac

SEQ ID NO: 7045 - DNA, 20 bp, Homo sapiens
tcagatctgtcgctccttca

SEQ ID NO: 7046 - DNA, 20 bp, Homo sapiens
gcagtctgagcacgcgtaag
